United States Patent Application Publication US 2023/0048732 A1 - sequence listing, part 3

SEQ ID NO: 42514 - protein, 9 aa, Artificial Sequence
  Description of Artificial Sequence: Synthetic peptide
GCLQMPCHE

SEQ ID NO: 42515 - protein, 9 aa, Artificial Sequence
  Description of Artificial Sequence: Synthetic peptide
MVENGLRLQ

SEQ ID NO: 42516 - protein, 9 aa, Artificial Sequence
  Description of Artificial Sequence: Synthetic peptide
SRCTVMDPG

SEQ ID NO: 42517 - protein, 9 aa, Artificial Sequence
  Description of Artificial Sequence: Synthetic peptide
IVQPMCYQQ

SEQ ID NO: 42518 - protein, 9 aa, Artificial Sequence
  Description of Artificial Sequence: Synthetic peptide
DVKAFMGGV

SEQ ID NO: 42519 - protein, 9 aa, Artificial Sequence
  Description of Artificial Sequence: Synthetic peptide
AYAPSKNAM

SEQ ID NO: 42520 - protein, 9 aa, Artificial Sequence
  Description of Artificial Sequence: Synthetic peptide
NVYMRTCNM

SEQ ID NO: 42521 - protein, 9 aa, Artificial Sequence
  Description of Artificial Sequence: Synthetic peptide
NAAYQMAAY

SEQ ID NO: 42522 - protein, 9 aa, Artificial Sequence
  Description of Artificial Sequence: Synthetic peptide
LVQKWMRTC

SEQ ID NO: 42523 - protein, 9 aa, Artificial Sequence
  Description of Artificial Sequence: Synthetic peptide
EKHFMQVDR

SEQ ID NO: 42524 - protein, 9 aa, Artificial Sequence
  Description of Artificial Sequence: Synthetic peptide
LEIVMHSLP

SEQ ID NO: 42525 - protein, 9 aa, Artificial Sequence
  Description of Artificial Sequence: Synthetic peptide
NQREWHGLA

SEQ ID NO: 42526 - protein, 9 aa, Artificial Sequence
  Description of Artificial Sequence: Synthetic peptide
LADGCCCVN

SEQ ID NO: 42527 - protein, 9 aa, Artificial Sequence
  Description of Artificial Sequence: Synthetic peptide
AVETGESAM

SEQ ID NO: 42528 - protein, 9 aa, Artificial Sequence
  Description of Artificial Sequence: Synthetic peptide
RCADNPYFR

SEQ ID NO: 42529 - protein, 9 aa, Artificial Sequence
  Description of Artificial Sequence: Synthetic peptide
ETHTVSREC

SEQ ID NO: 42530 - protein, 9 aa, Artificial Sequence
  Description of Artificial Sequence: Synthetic peptide
QAAWIPFAG

SEQ ID NO: 42531 - protein, 9 aa, Artificial Sequence
  Description of Artificial Sequence: Synthetic peptide
AVEDYWRYF

SEQ ID NO: 42532 - protein, 9 aa, Artificial Sequence
  Description of Artificial Sequence: Synthetic peptide
QYVQCAAKD

SEQ ID NO: 42533 - protein, 9 aa, Artificial Sequence
  Description of Artificial Sequence: Synthetic peptide
ACIPQMHSA

SEQ ID NO: 42534 - protein, 9 aa, Artificial Sequence
  Description of Artificial Sequence: Synthetic peptide
AVTGHVIGA

SEQ ID NO: 42535 - protein, 9 aa, Artificial Sequence
  Description of Artificial Sequence: Synthetic peptide
WGDARMIGP

SEQ ID NO: 42536 - protein, 9 aa, Artificial Sequence
  Description of Artificial Sequence: Synthetic peptide
TGMAMSEQS

SEQ ID NO: 42537 - protein, 9 aa, Artificial Sequence
  Description of Artificial Sequence: Synthetic peptide
VFNLMLQDK

SEQ ID NO: 42538 - protein, 9 aa, Artificial Sequence
  Description of Artificial Sequence: Synthetic peptide
VTCNWCVMP

SEQ ID NO: 42539 - protein, 9 aa, Artificial Sequence
  Description of Artificial Sequence: Synthetic peptide
DANHCMWWQ

SEQ ID NO: 42540 - protein, 9 aa, Artificial Sequence
  Description of Artificial Sequence: Synthetic peptide
QISKPSVQC

SEQ ID NO: 42541 - protein, 9 aa, Artificial Sequence
  Description of Artificial Sequence: Synthetic peptide
WTTSIAVDT

SEQ ID NO: 42542 - protein, 9 aa, Artificial Sequence
  Description of Artificial Sequence: Synthetic peptide
QTSHQDQDC

SEQ ID NO: 42543 - protein, 9 aa, Artificial Sequence
  Description of Artificial Sequence: Synthetic peptide
QAKMILDGT

SEQ ID NO: 42544 - protein, 9 aa, Artificial Sequence
  Description of Artificial Sequence: Synthetic peptide
IHNRYAQAP

SEQ ID NO: 42545 - protein, 9 aa, Artificial Sequence
  Description of Artificial Sequence: Synthetic peptide
NWYTTWIDE

SEQ ID NO: 42546 - protein, 9 aa, Artificial Sequence
  Description of Artificial Sequence: Synthetic peptide
CMEVTCFVV

SEQ ID NO: 42547 - protein, 9 aa, Artificial Sequence
  Description of Artificial Sequence: Synthetic peptide
AYRVKEVAY

SEQ ID NO: 42548 - protein, 9 aa, Artificial Sequence
  Description of Artificial Sequence: Synthetic peptide
APVHPTQSM

SEQ ID NO: 42549 - protein, 9 aa, Artificial Sequence
  Description of Artificial Sequence: Synthetic peptide
QKAIVAQND

SEQ ID NO: 42550 - protein, 9 aa, Artificial Sequence
  Description of Artificial Sequence: Synthetic peptide
AQGFKPSDG

SEQ ID NO: 42551 - protein, 9 aa, Artificial Sequence
  Description of Artificial Sequence: Synthetic peptide
NANYWFYYD

SEQ ID NO: 42552 - protein, 9 aa, Artificial Sequence
  Description of Artificial Sequence: Synthetic peptide
TRETMNEWH

SEQ ID NO: 42553 - protein, 9 aa, Artificial Sequence
  Description of Artificial Sequence: Synthetic peptide
GVWMPHGWR

SEQ ID NO: 42554 - protein, 9 aa, Artificial Sequence
  Description of Artificial Sequence: Synthetic peptide
AVHNVKDVH

SEQ ID NO: 42555 - protein, 9 aa, Artificial Sequence
  Description of Artificial Sequence: Synthetic peptide
ETSTHCCKV

SEQ ID NO: 42556 - protein, 9 aa, Artificial Sequence
  Description of Artificial Sequence: Synthetic peptide
FQDERTTHH

SEQ ID NO: 42557 - protein, 9 aa, Artificial Sequence
  Description of Artificial Sequence: Synthetic peptide
KSNLCYHVQ

SEQ ID NO: 42558 - protein, 9 aa, Artificial Sequence
  Description of Artificial Sequence: Synthetic peptide
DTRRNLCCD

SEQ ID NO: 42559 - protein, 9 aa, Artificial Sequence
  Description of Artificial Sequence: Synthetic peptide
AEHMVVDHE

SEQ ID NO: 42560 - protein, 9 aa, Artificial Sequence
  Description of Artificial Sequence: Synthetic peptide
DVYTMHELH

SEQ ID NO: 42561 - protein, 9 aa, Artificial Sequence
  Description of Artificial Sequence: Synthetic peptide
MKEDNKFAV

SEQ ID NO: 42562 - protein, 9 aa, Artificial Sequence
  Description of Artificial Sequence: Synthetic peptide
MFFPGFVAH

SEQ ID NO: 42563 - protein, 9 aa, Artificial Sequence
  Description of Artificial Sequence: Synthetic peptide
RFDQFWDTY

SEQ ID NO: 42564 - protein, 9 aa, Artificial Sequence
  Description of Artificial Sequence: Synthetic peptide
HFQPVFMQP

SEQ ID NO: 42565 - protein, 9 aa, Artificial Sequence
  Description of Artificial Sequence: Synthetic peptide
DIEFLDCEN

SEQ ID NO: 42566 - protein, 9 aa, Artificial Sequence
  Description of Artificial Sequence: Synthetic peptide
QCLQTNPYN

SEQ ID NO: 42567 - protein, 9 aa, Artificial Sequence
  Description of Artificial Sequence: Synthetic peptide
RTMDCEYTG

SEQ ID NO: 42568 - protein, 9 aa, Artificial Sequence
  Description of Artificial Sequence: Synthetic peptide
MSGPNDTEF

SEQ ID NO: 42569 - protein, 9 aa, Artificial Sequence
  Description of Artificial Sequence: Synthetic peptide
IGDEYATHT

SEQ ID NO: 42570 - protein, 9 aa, Artificial Sequence
  Description of Artificial Sequence: Synthetic peptide
SFSDTHLGW

SEQ ID NO: 42571 - protein, 9 aa, Artificial Sequence
  Description of Artificial Sequence: Synthetic peptide
YFPSIQCYE

SEQ ID NO: 42572 - protein, 9 aa, Artificial Sequence
  Description of Artificial Sequence: Synthetic peptide
IRLMTPDEN

SEQ ID NO: 42573 - protein, 9 aa, Artificial Sequence
  Description of Artificial Sequence: Synthetic peptide
ICHIRTRGN

SEQ ID NO: 42574 - protein, 9 aa, Artificial Sequence
  Description of Artificial Sequence: Synthetic peptide
MCDNFPSAH

SEQ ID NO: 42575 - protein, 9 aa, Artificial Sequence
  Description of Artificial Sequence: Synthetic peptide
SSIYKEIQE

SEQ ID NO: 42576 - protein, 9 aa, Artificial Sequence
  Description of Artificial Sequence: Synthetic peptide
PMMIIPYVD

SEQ ID NO: 42577 - protein, 9 aa, Artificial Sequence
  Description of Artificial Sequence: Synthetic peptide
PLTIEVNCT

SEQ ID NO: 42578 - protein, 9 aa, Artificial Sequence
  Description of Artificial Sequence: Synthetic peptide
NVCDNGHEI

SEQ ID NO: 42579 - protein, 9 aa, Artificial Sequence
  Description of Artificial Sequence: Synthetic peptide
KIAAWNDFL

SEQ ID NO: 42580 - protein, 9 aa, Artificial Sequence
  Description of Artificial Sequence: Synthetic peptide
HQCNCLLSW

SEQ ID NO: 42581 - protein, 9 aa, Artificial Sequence
  Description of Artificial Sequence: Synthetic peptide
GAANRIQSW

SEQ ID NO: 42582 - protein, 9 aa, Artificial Sequence
  Description of Artificial Sequence: Synthetic peptide
DVWWTLTRD

SEQ ID NO: 42583 - protein, 9 aa, Artificial Sequence
  Description of Artificial Sequence: Synthetic peptide
CSESYRGPD

SEQ ID NO: 42584 - protein, 9 aa, Artificial Sequence
  Description of Artificial Sequence: Synthetic peptide
TISQIPWVR

SEQ ID NO: 42585 - protein, 9 aa, Artificial Sequence
  Description of Artificial Sequence: Synthetic peptide
MFMTNVNSF

SEQ ID NO: 42586 - protein, 9 aa, Artificial Sequence
  Description of Artificial Sequence: Synthetic peptide
GKGQWTAQE

SEQ ID NO: 42587 - protein, 9 aa, Artificial Sequence
  Description of Artificial Sequence: Synthetic peptide
SGALKNREE

SEQ ID NO: 42588 - protein, 9 aa, Artificial Sequence
  Description of Artificial Sequence: Synthetic peptide
LHSYQWRLG

SEQ ID NO: 42589 - protein, 9 aa, Artificial Sequence
  Description of Artificial Sequence: Synthetic peptide
DVKSWAVCD

SEQ ID NO: 42590 - protein, 9 aa, Artificial Sequence
  Description of Artificial Sequence: Synthetic peptide
LPSHCNLGS

SEQ ID NO: 42591 - protein, 9 aa, Artificial Sequence
  Description of Artificial Sequence: Synthetic peptide
GQQTIEMSY

SEQ ID NO: 42592 - protein, 9 aa, Artificial Sequence
  Description of Artificial Sequence: Synthetic peptide
QWFTKGVGE

SEQ ID NO: 42593 - protein, 9 aa, Artificial Sequence
  Description of Artificial Sequence: Synthetic peptide
QRNEMSASR

SEQ ID NO: 42594 - protein, 9 aa, Artificial Sequence
  Description of Artificial Sequence: Synthetic peptide
YPAQYTAFS

SEQ ID NO: 42595 - protein, 9 aa, Artificial Sequence
  Description of Artificial Sequence: Synthetic peptide
DHLSNDAEM

SEQ ID NO: 42596 - protein, 9 aa, Artificial Sequence
  Description of Artificial Sequence: Synthetic peptide
DQEAQVVTG

SEQ ID NO: 42597 - protein, 9 aa, Artificial Sequence
  Description of Artificial Sequence: Synthetic peptide
ASMHEETCL

SEQ ID NO: 42598 - protein, 9 aa, Artificial Sequence
  Description of Artificial Sequence: Synthetic peptide
TTYPHNTHG

SEQ ID NO: 42599 - protein, 9 aa, Artificial Sequence
  Description of Artificial Sequence: Synthetic peptide
QFAQLWCAK

SEQ ID NO: 42600 - protein, 9 aa, Artificial Sequence
  Description of Artificial Sequence: Synthetic peptide
MTDNNGPLF

SEQ ID NO: 42601 - protein, 9 aa, Artificial Sequence
  Description of Artificial Sequence: Synthetic peptide
RYPCCQSPF

SEQ ID NO: 42602 - protein, 9 aa, Artificial Sequence
  Description of Artificial Sequence: Synthetic peptide
CAWHMKQGN

SEQ ID NO: 42603 - protein, 9 aa, Artificial Sequence
  Description of Artificial Sequence: Synthetic peptide
TSVIRLFWI

SEQ ID NO: 42604 - protein, 9 aa, Artificial Sequence
  Description of Artificial Sequence: Synthetic peptide
TTTNQFMFQ

SEQ ID NO: 42605 - protein, 9 aa, Artificial Sequence
  Description of Artificial Sequence: Synthetic peptide
MMLGYMEQD

SEQ ID NO: 42606 - protein, 9 aa, Artificial Sequence
  Description of Artificial Sequence: Synthetic peptide
GLFEGSPGA

SEQ ID NO: 42607 - protein, 9 aa, Artificial Sequence
  Description of Artificial Sequence: Synthetic peptide
AEDTPYTIY

SEQ ID NO: 42608 - protein, 9 aa, Artificial Sequence
  Description of Artificial Sequence: Synthetic peptide
QHKWHDVGV

SEQ ID NO: 42609 - protein, 9 aa, Artificial Sequence
  Description of Artificial Sequence: Synthetic peptide
NRIQMTDFQ

SEQ ID NO: 42610 - protein, 9 aa, Artificial Sequence
  Description of Artificial Sequence: Synthetic peptide
YVDHWTLGD

SEQ ID NO: 42611 - protein, 9 aa, Artificial Sequence
  Description of Artificial Sequence: Synthetic peptide
ACVERLHHK

SEQ ID NO: 42612 - protein, 9 aa, Artificial Sequence
  Description of Artificial Sequence: Synthetic peptide
DQRHGNVSP

SEQ ID NO: 42613 - protein, 9 aa, Artificial Sequence
  Description of Artificial Sequence: Synthetic peptide
ATGTYNLQE

SEQ ID NO: 42614 - protein, 9 aa, Artificial Sequence
  Description of Artificial Sequence: Synthetic peptide
EAGCKMWPT

SEQ ID NO: 42615 - protein, 9 aa, Artificial Sequence
  Description of Artificial Sequence: Synthetic peptide
KQKTQNRNA

SEQ ID NO: 42616 - protein, 9 aa, Artificial Sequence
  Description of Artificial Sequence: Synthetic peptide
ASKQGTHDY

SEQ ID NO: 42617 - protein, 9 aa, Artificial Sequence
  Description of Artificial Sequence: Synthetic peptide
TYESLQNSW

SEQ ID NO: 42618 - protein, 9 aa, Artificial Sequence
  Description of Artificial Sequence: Synthetic peptide
MNLQIGSKG

SEQ ID NO: 42619 - protein, 9 aa, Artificial Sequence
  Description of Artificial Sequence: Synthetic peptide
GRALGKKQG

SEQ ID NO: 42620 - protein, 9 aa, Artificial Sequence
  Description of Artificial Sequence: Synthetic peptide
EVRIQCKID

SEQ ID NO: 42621 - protein, 9 aa, Artificial Sequence
  Description of Artificial Sequence: Synthetic peptide
PHAETHWYT

SEQ ID NO: 42622 - protein, 9 aa, Artificial Sequence
  Description of Artificial Sequence: Synthetic peptide
WERCLELNQ

SEQ ID NO: 42623 - protein, 9 aa, Artificial Sequence
  Description of Artificial Sequence: Synthetic peptide
AGMYKCQED

SEQ ID NO: 42624 - protein, 9 aa, Artificial Sequence
  Description of Artificial Sequence: Synthetic peptide
TVNWYSGFG

SEQ ID NO: 42625 - protein, 9 aa, Artificial Sequence
  Description of Artificial Sequence: Synthetic peptide
ATMNLSWGL

SEQ ID NO: 42626 - protein, 9 aa, Artificial Sequence
  Description of Artificial Sequence: Synthetic peptide
QSSHCKQMV

SEQ ID NO: 42627 - protein, 9 aa, Artificial Sequence
  Description of Artificial Sequence: Synthetic peptide
YSDPKNMSI

SEQ ID NO: 42628 - protein, 9 aa, Artificial Sequence
  Description of Artificial Sequence: Synthetic peptide
GHLFNNNEW

SEQ ID NO: 42629 - protein, 9 aa, Artificial Sequence
  Description of Artificial Sequence: Synthetic peptide
DINTCRVCY

SEQ ID NO: 42630 - protein, 9 aa, Artificial Sequence
  Description of Artificial Sequence: Synthetic peptide
MSDQKEHMS

SEQ ID NO: 42631 - protein, 9 aa, Artificial Sequence
  Description of Artificial Sequence: Synthetic peptide
AGCSISWTP

SEQ ID NO: 42632 - protein, 9 aa, Artificial Sequence
  Description of Artificial Sequence: Synthetic peptide
AVIVTADMQ

SEQ ID NO: 42633 - protein, 9 aa, Artificial Sequence
  Description of Artificial Sequence: Synthetic peptide
AWQQNTFWY

SEQ ID NO: 42634 - protein, 9 aa, Artificial Sequence
  Description of Artificial Sequence: Synthetic peptide
AWTQASRGN

SEQ ID NO: 42635 - protein, 9 aa, Artificial Sequence
  Description of Artificial Sequence: Synthetic peptide
AWYKAWSHV

SEQ ID NO: 42636 - protein, 9 aa, Artificial Sequence
  Description of Artificial Sequence: Synthetic peptide
DFFLMKIAD

SEQ ID NO: 42637 - protein, 9 aa, Artificial Sequence
  Description of Artificial Sequence: Synthetic peptide
DLDFWNGQS

SEQ ID NO: 42638 - protein, 9 aa, Artificial Sequence
  Description of Artificial Sequence: Synthetic peptide
DVQEAMNLV

SEQ ID NO: 42639 - protein, 9 aa, Artificial Sequence
  Description of Artificial Sequence: Synthetic peptide
DVRLATAWH

SEQ ID NO: 42640 - protein, 9 aa, Artificial Sequence
  Description of Artificial Sequence: Synthetic peptide
DVYATPVVC

SEQ ID NO: 42641 - protein, 9 aa, Artificial Sequence
  Description of Artificial Sequence: Synthetic peptide
ECVEGQSCW

SEQ ID NO: 42642 - protein, 9 aa, Artificial Sequence
  Description of Artificial Sequence: Synthetic peptide
ETKYWWVNF

SEQ ID NO: 42643 - protein, 9 aa, Artificial Sequence
  Description of Artificial Sequence: Synthetic peptide
EVTQCDFFV

SEQ ID NO: 42644 - protein, 9 aa, Artificial Sequence
  Description of Artificial Sequence: Synthetic peptide
FTGASFHIA

SEQ ID NO: 42645 - protein, 9 aa, Artificial Sequence
  Description of Artificial Sequence: Synthetic peptide
GCMYIRHAY

SEQ ID NO: 42646 - protein, 9 aa, Artificial Sequence
  Description of Artificial Sequence: Synthetic peptide
GIDAHAIIY

SEQ ID NO: 42647 - protein, 9 aa, Artificial Sequence
  Description of Artificial Sequence: Synthetic peptide
GTMCRERMI

SEQ ID NO: 42648 - protein, 9 aa, Artificial Sequence
  Description of Artificial Sequence: Synthetic peptide
GYMCIRHAY

SEQ ID NO: 42649 - protein, 9 aa, Artificial Sequence
  Description of Artificial Sequence: Synthetic peptide
HAYSLLQQY

SEQ ID NO: 42650 - protein, 9 aa, Artificial Sequence
  Description of Artificial Sequence: Synthetic peptide
HLAPYCQQA

SEQ ID NO: 42651 - protein, 9 aa, Artificial Sequence
  Description of Artificial Sequence: Synthetic peptide
HLTMWLVMT

SEQ ID NO: 42652 - protein, 9 aa, Artificial Sequence
  Description of Artificial Sequence: Synthetic peptide
IHDLVPAYD

SEQ ID NO: 42653 - protein, 9 aa, Artificial Sequence
  Description of Artificial Sequence: Synthetic peptide
IKQFWTKKM

SEQ ID NO: 42654 - protein, 9 aa, Artificial Sequence
  Description of Artificial Sequence: Synthetic peptide
ITHRYGWNL

SEQ ID NO: 42655 - protein, 9 aa, Artificial Sequence
  Description of Artificial Sequence: Synthetic peptide
KGMHSMPGI

SEQ ID NO: 42656 - protein, 9 aa, Artificial Sequence
  Description of Artificial Sequence: Synthetic peptide
KLTIDTACR

SEQ ID NO: 42657 - protein, 9 aa, Artificial Sequence
  Description of Artificial Sequence: Synthetic peptide
KQAGMLLGW

SEQ ID NO: 42658 - protein, 9 aa, Artificial Sequence
  Description of Artificial Sequence: Synthetic peptide
KSNDSDNEF

SEQ ID NO: 42659 - protein, 9 aa, Artificial Sequence
  Description of Artificial Sequence: Synthetic peptide
LMWTRNTAH

SEQ ID NO: 42660 - protein, 9 aa, Artificial Sequence
  Description of Artificial Sequence: Synthetic peptide
LNIQCTNQA

SEQ ID NO: 42661 - protein, 9 aa, Artificial Sequence
  Description of Artificial Sequence: Synthetic peptide
LRHANRRTY

SEQ ID NO: 42662 - protein, 9 aa, Artificial Sequence
  Description of Artificial Sequence: Synthetic peptide
LVKAHCAWS

SEQ ID NO: 42663 - protein, 9 aa, Artificial Sequence
  Description of Artificial Sequence: Synthetic peptide
MAELCMEGH

SEQ ID NO: 42664 - protein, 9 aa, Artificial Sequence
  Description of Artificial Sequence: Synthetic peptide
MYMPATMAV

SEQ ID NO: 42665 - protein, 9 aa, Artificial Sequence
  Description of Artificial Sequence: Synthetic peptide
NAEDVDQGE

SEQ ID NO: 42666 - protein, 9 aa, Artificial Sequence
  Description of Artificial Sequence: Synthetic peptide
NCCFVYWWL

SEQ ID NO: 42667 - protein, 9 aa, Artificial Sequence
  Description of Artificial Sequence: Synthetic peptide
NDRHVPCRD

SEQ ID NO: 42668 - protein, 9 aa, Artificial Sequence
  Description of Artificial Sequence: Synthetic peptide
NLMTDWWDI

SEQ ID NO: 42669 - protein, 9 aa, Artificial Sequence
  Description of Artificial Sequence: Synthetic peptide
PPEQFQSGK

SEQ ID NO: 42670 - protein, 9 aa, Artificial Sequence
  Description of Artificial Sequence: Synthetic peptide
PVQKWMRTC

SEQ ID NO: 42671 - protein, 9 aa, Artificial Sequence
  Description of Artificial Sequence: Synthetic peptide
QACLQIMWN

SEQ ID NO: 42672 - protein, 9 aa, Artificial Sequence
  Description of Artificial Sequence: Synthetic peptide
QGYRSSEMQ

SEQ ID NO: 42673 - protein, 9 aa, Artificial Sequence
  Description of Artificial Sequence: Synthetic peptide
QKALNVHHA

SEQ ID NO: 42674 - protein, 9 aa, Artificial Sequence
  Description of Artificial Sequence: Synthetic peptide
QMHMVHKCE

SEQ ID NO: 42675 - protein, 9 aa, Artificial Sequence
  Description of Artificial Sequence: Synthetic peptide
QNMLMQAGV

SEQ ID NO: 42676 - protein, 9 aa, Artificial Sequence
  Description of Artificial Sequence: Synthetic peptide
QYIDTYHWT

SEQ ID NO: 42677 - protein, 9 aa, Artificial Sequence
  Description of Artificial Sequence: Synthetic peptide
QYQTHPMMH

SEQ ID NO: 42678 - protein, 9 aa, Artificial Sequence
  Description of Artificial Sequence: Synthetic peptide
RNKSPDECF

SEQ ID NO: 42679 - protein, 9 aa, Artificial Sequence
  Description of Artificial Sequence: Synthetic peptide
RTAHRDDFA

SEQ ID NO: 42680 - protein, 9 aa, Artificial Sequence
  Description of Artificial Sequence: Synthetic peptide
RVEYPPFTS

SEQ ID NO: 42681 - protein, 9 aa, Artificial Sequence
  Description of Artificial Sequence: Synthetic peptide
SFLVMNRMG

SEQ ID NO: 42682 - protein, 9 aa, Artificial Sequence
  Description of Artificial Sequence: Synthetic peptide
TDLWYEKSS

SEQ ID NO: 42683 - protein, 9 aa, Artificial Sequence
  Description of Artificial Sequence: Synthetic peptide
TEAKRTIDW

SEQ ID NO: 42684 - protein, 9 aa, Artificial Sequence
  Description of Artificial Sequence: Synthetic peptide
TGCYHVHMD

SEQ ID NO: 42685 - protein, 9 aa, Artificial Sequence
  Description of Artificial Sequence: Synthetic peptide
TICKCKISN

SEQ ID NO: 42686 - protein, 9 aa, Artificial Sequence
  Description of Artificial Sequence: Synthetic peptide
TIQQCMHLG

SEQ ID NO: 42687 - protein, 9 aa, Artificial Sequence
  Description of Artificial Sequence: Synthetic peptide
TPQNNAMSM

SEQ ID NO: 42688 - protein, 9 aa, Artificial Sequence
  Description of Artificial Sequence: Synthetic peptide
TRRTCPIAM

SEQ ID NO: 42689 - protein, 9 aa, Artificial Sequence
  Description of Artificial Sequence: Synthetic peptide
VRWGYTCFY

SEQ ID NO: 42690 - protein, 9 aa, Artificial Sequence
  Description of Artificial Sequence: Synthetic peptide
YFEHMMITT

SEQ ID NO: 42691 - protein, 9 aa, Artificial Sequence
  Description of Artificial Sequence: Synthetic peptide
YFHMIDQIP

SEQ ID NO: 42692 - protein, 9 aa, Artificial Sequence
  Description of Artificial Sequence: Synthetic peptide
YNDFNRGEW

SEQ ID NO: 42693 - protein, 9 aa, Artificial Sequence
  Description of Artificial Sequence: Synthetic peptide
YSNCQPTHM

SEQ ID NO: 42694 - protein, 9 aa, Artificial Sequence
  Description of Artificial Sequence: Synthetic peptide
ADGWWMDSL

SEQ ID NO: 42695 - protein, 9 aa, Artificial Sequence
  Description of Artificial Sequence: Synthetic peptide
AHLEMMNQF

SEQ ID NO: 42696 - protein, 9 aa, Artificial Sequence
  Description of Artificial Sequence: Synthetic peptide
ALLMFSLSN

SEQ ID NO: 42697 - protein, 9 aa, Artificial Sequence
  Description of Artificial Sequence: Synthetic peptide
AMLDSHSAF

SEQ ID NO: 42698 - protein, 9 aa, Artificial Sequence
  Description of Artificial Sequence: Synthetic peptide
AQSRMHTMD

SEQ ID NO: 42699 - protein, 9 aa, Artificial Sequence
  Description of Artificial Sequence: Synthetic peptide
ARTMYVESF

SEQ ID NO: 42700 - protein, 9 aa, Artificial Sequence
  Description of Artificial Sequence: Synthetic peptide
ASEYFPVFK

SEQ ID NO: 42701 - protein, 9 aa, Artificial Sequence
  Description of Artificial Sequence: Synthetic peptide
ASIWPEGKD

SEQ ID NO: 42702 - protein, 9 aa, Artificial Sequence
  Description of Artificial Sequence: Synthetic peptide
AVICKRFVG

SEQ ID NO: 42703 - protein, 9 aa, Artificial Sequence
  Description of Artificial Sequence: Synthetic peptide
AVIMTADMQ

SEQ ID NO: 42704 - protein, 9 aa, Artificial Sequence
  Description of Artificial Sequence: Synthetic peptide
AVKANDTVH

SEQ ID NO: 42705 - protein, 9 aa, Artificial Sequence
  Description of Artificial Sequence: Synthetic peptide
AWDANLAFV

SEQ ID NO: 42706 - protein, 9 aa, Artificial Sequence
  Description of Artificial Sequence: Synthetic peptide
CAHTDKVHH

SEQ ID NO: 42707 - protein, 9 aa, Artificial Sequence
  Description of Artificial Sequence: Synthetic peptide
CEIVVSHVE

SEQ ID NO: 42708 - protein, 9 aa, Artificial Sequence
  Description of Artificial Sequence: Synthetic peptide
CLRSDIGKQ

SEQ ID NO: 42709 - protein, 9 aa, Artificial Sequence
  Description of Artificial Sequence: Synthetic peptide
CNEKGYHWH

SEQ ID NO: 42710 - protein, 9 aa, Artificial Sequence
  Description of Artificial Sequence: Synthetic peptide
CTLSFMEDK

SEQ ID NO: 42711 - protein, 9 aa, Artificial Sequence
  Description of Artificial Sequence: Synthetic peptide
CVRFTPTHN

SEQ ID NO: 42712 - protein, 9 aa, Artificial Sequence
  Description of Artificial Sequence: Synthetic peptide
DCAWQTNTS

SEQ ID NO: 42713 - protein, 9 aa, Artificial Sequence
  Description of Artificial Sequence: Synthetic peptide
DCMCNFAGM

SEQ ID NO: 42714 - protein, 9 aa, Artificial Sequence
  Description of Artificial Sequence: Synthetic peptide
DFFPMKIAD

SEQ ID NO: 42715 - protein, 9 aa, Artificial Sequence
  Description of Artificial Sequence: Synthetic peptide
DHRYMMSSV

SEQ ID NO: 42716 - protein, 9 aa, Artificial Sequence
  Description of Artificial Sequence: Synthetic peptide
DISLKLCHQ

SEQ ID NO: 42717 - protein, 9 aa, Artificial Sequence
  Description of Artificial Sequence: Synthetic peptide
DITWPNHSY

SEQ ID NO: 42718 - protein, 9 aa, Artificial Sequence
  Description of Artificial Sequence: Synthetic peptide
EEGATSGWP

SEQ ID NO: 42719 - protein, 9 aa, Artificial Sequence
  Description of Artificial Sequence: Synthetic peptide
EIQPMMRKP

SEQ ID NO: 42720 - protein, 9 aa, Artificial Sequence
  Description of Artificial Sequence: Synthetic peptide
EMTLQSVSS

SEQ ID NO: 42721 - protein, 9 aa, Artificial Sequence
  Description of Artificial Sequence: Synthetic peptide
EPKYWWVNF

SEQ ID NO: 42722 - protein, 9 aa, Artificial Sequence
  Description of Artificial Sequence: Synthetic peptide
ESILPGKIL

SEQ ID NO: 42723 - protein, 9 aa, Artificial Sequence
  Description of Artificial Sequence: Synthetic peptide
FASLCNNGL

SEQ ID NO: 42724 - protein, 9 aa, Artificial Sequence
  Description of Artificial Sequence: Synthetic peptide
FASLSGPPN

SEQ ID NO: 42725 - protein, 9 aa, Artificial Sequence
  Description of Artificial Sequence: Synthetic peptide
FTCNHLAFY

SEQ ID NO: 42726 - protein, 9 aa, Artificial Sequence
  Description of Artificial Sequence: Synthetic peptide
GEEADEYHM

SEQ ID NO: 42727 - protein, 9 aa, Artificial Sequence
  Description of Artificial Sequence: Synthetic peptide
GGMAHAIIN

SEQ ID NO: 42728 - protein, 9 aa, Artificial Sequence
  Description of Artificial Sequence: Synthetic peptide
GLENVVVGL

SEQ ID NO: 42729 - protein, 9 aa, Artificial Sequence
  Description of Artificial Sequence: Synthetic peptide
GNDFFVNIY

SEQ ID NO: 42730 - protein, 9 aa, Artificial Sequence
  Description of Artificial Sequence: Synthetic peptide
HASSEHVQD

SEQ ID NO: 42731 - protein, 9 aa, Artificial Sequence
  Description of Artificial Sequence: Synthetic peptide
HMGPYMESE

SEQ ID NO: 42732 - protein, 9 aa, Artificial Sequence
  Description of Artificial Sequence: Synthetic peptide
IAMRTLNQK

SEQ ID NO: 42733 - protein, 9 aa, Artificial Sequence
  Description of Artificial Sequence: Synthetic peptide
IAMTAILCD

SEQ ID NO: 42734 - protein, 9 aa, Artificial Sequence
  Description of Artificial Sequence: Synthetic peptide
IATWGEQQM

SEQ ID NO: 42735 - protein, 9 aa, Artificial Sequence
  Description of Artificial Sequence: Synthetic peptide
IECEWPQDE

SEQ ID NO: 42736 - protein, 9 aa, Artificial Sequence
  Description of Artificial Sequence: Synthetic peptide
IECKWPQDK

SEQ ID NO: 42737 - protein, 9 aa, Artificial Sequence
  Description of Artificial Sequence: Synthetic peptide
ITPKFMFPS

SEQ ID NO: 42738 - protein, 9 aa, Artificial Sequence
  Description of Artificial Sequence: Synthetic peptide
KASEHLPGF

SEQ ID NO: 42739 - protein, 9 aa, Artificial Sequence
  Description of Artificial Sequence: Synthetic peptide
KGLTIQKYA

SEQ ID NO: 42740 - protein, 9 aa, Artificial Sequence
  Description of Artificial Sequence: Synthetic peptide
KMCTHDLAC

SEQ ID NO: 42741 - protein, 9 aa, Artificial Sequence
  Description of Artificial Sequence: Synthetic peptide
KPQPTGIFT

SEQ ID NO: 42742 - protein, 9 aa, Artificial Sequence
  Description of Artificial Sequence: Synthetic peptide
KTDFVFLPQ

SEQ ID NO: 42743 - protein, 9 aa, Artificial Sequence
  Description of Artificial Sequence: Synthetic peptide
KVVPAEHQY

SEQ ID NO: 42744 - protein, 9 aa, Artificial Sequence
  Description of Artificial Sequence: Synthetic peptide
LAGPKLWEQ

SEQ ID NO: 42745 - protein, 9 aa, Artificial Sequence
  Description of Artificial Sequence: Synthetic peptide
LAHMIEITA

SEQ ID NO: 42746 - protein, 9 aa, Artificial Sequence
  Description of Artificial Sequence: Synthetic peptide
LCGHCGESC

SEQ ID NO: 42747 - protein, 9 aa, Artificial Sequence
  Description of Artificial Sequence: Synthetic peptide
LCKYCFTAD

SEQ ID NO: 42748 - protein, 9 aa, Artificial Sequence
  Description of Artificial Sequence: Synthetic peptide
LRSLWEAWH

SEQ ID NO: 42749 - protein, 9 aa, Artificial Sequence
  Description of Artificial Sequence: Synthetic peptide
LTKFLHKGD

SEQ ID NO: 42750 - protein, 9 aa, Artificial Sequence
  Description of Artificial Sequence: Synthetic peptide
MGYKRAASR

SEQ ID NO: 42751 - protein, 9 aa, Artificial Sequence
  Description of Artificial Sequence: Synthetic peptide
MMFRPNSAH

SEQ ID NO: 42752 - protein, 9 aa, Artificial Sequence
  Description of Artificial Sequence: Synthetic peptide
MNKFREEYG

SEQ ID NO: 42753 - protein, 9 aa, Artificial Sequence
  Description of Artificial Sequence: Synthetic peptide
MPQGAVNSD

SEQ ID NO: 42754 - protein, 9 aa, Artificial Sequence
  Description of Artificial Sequence: Synthetic peptide
MSSFMASRE

SEQ ID NO: 42755 - protein, 9 aa, Artificial Sequence
  Description of Artificial Sequence: Synthetic peptide
MTNNKMMYE

SEQ ID NO: 42756 - protein, 9 aa, Artificial Sequence
  Description of Artificial Sequence: Synthetic peptide
NCVVNLCTY

SEQ ID NO: 42757 - protein, 9 aa, Artificial Sequence
  Description of Artificial Sequence: Synthetic peptide
NEPLFMMGS

SEQ ID NO: 42758 - protein, 9 aa, Artificial Sequence
  Description of Artificial Sequence: Synthetic peptide
NGVWCKIDV

SEQ ID NO: 42759 - protein, 9 aa, Artificial Sequence
  Description of Artificial Sequence: Synthetic peptide
NLSPINWHL

SEQ ID NO: 42760 - protein, 9 aa, Artificial Sequence
  Description of Artificial Sequence: Synthetic peptide
NQLPEMIET

SEQ ID NO: 42761 - protein, 9 aa, Artificial Sequence
  Description of Artificial Sequence: Synthetic peptide
NRDGVPQSY

SEQ ID NO: 42762 - protein, 9 aa, Artificial Sequence
  Description of Artificial Sequence: Synthetic peptide
NSSMIEWDC

SEQ ID NO: 42763 - protein, 9 aa, Artificial Sequence
  Description of Artificial Sequence: Synthetic peptide
NTAHLQDGW

SEQ ID NO: 42764 - protein, 9 aa, Artificial Sequence
  Description of Artificial Sequence: Synthetic peptide
NTRLVFGIT

SEQ ID NO: 42765 - protein, 9 aa, Artificial Sequence
  Description of Artificial Sequence: Synthetic peptide
NTSIWERDQ

SEQ ID NO: 42766 - protein, 9 aa, Artificial Sequence
  Description of Artificial Sequence: Synthetic peptide
NTWVPHEFY

SEQ ID NO: 42767 - protein, 9 aa, Artificial Sequence
  Description of Artificial Sequence: Synthetic peptide
NVFVAYCKS

SEQ ID NO: 42768 - protein, 9 aa, Artificial Sequence
  Description of Artificial Sequence: Synthetic peptide
NVMRVPTGQ

SEQ ID NO: 42769 - protein, 9 aa, Artificial Sequence
  Description of Artificial Sequence: Synthetic peptide
PRNQLGPGI

SEQ ID NO: 42770 - protein, 9 aa, Artificial Sequence
  Description of Artificial Sequence: Synthetic peptide
PSSQFKCDQ

SEQ ID NO: 42771 - protein, 9 aa, Artificial Sequence
  Description of Artificial Sequence: Synthetic peptide
PTIACGNMV

SEQ ID NO: 42772 - protein, 9 aa, Artificial Sequence
  Description of Artificial Sequence: Synthetic peptide
PWKYCCMDQ

SEQ ID NO: 42773 - protein, 9 aa, Artificial Sequence
  Description of Artificial Sequence: Synthetic peptide
PYVDKWANH

SEQ ID NO: 42774 - protein, 9 aa, Artificial Sequence
  Description of Artificial Sequence: Synthetic peptide
QIHRAGAKQ

SEQ ID NO: 42775 - protein, 9 aa, Artificial Sequence
  Description of Artificial Sequence: Synthetic peptide
QNRLVNRQH

SEQ ID NO: 42776 - protein, 9 aa, Artificial Sequence
  Description of Artificial Sequence: Synthetic peptide
QRDFAWQFC

SEQ ID NO: 42777 - protein, 9 aa, Artificial Sequence
  Description of Artificial Sequence: Synthetic peptide
QRQGQPHYW

SEQ ID NO: 42778 - protein, 9 aa, Artificial Sequence
  Description of Artificial Sequence: Synthetic peptide
QSFSYDAKE

SEQ ID NO: 42779 - protein, 9 aa, Artificial Sequence
  Description of Artificial Sequence: Synthetic peptide
RFKTCRYMY

SEQ ID NO: 42780 - protein, 9 aa, Artificial Sequence
  Description of Artificial Sequence: Synthetic peptide
RKVRIDGDT

SEQ ID NO: 42781 - protein, 9 aa, Artificial Sequence
  Description of Artificial Sequence: Synthetic peptide
RNEKGYHWH

SEQ ID NO: 42782 - protein, 9 aa, Artificial Sequence
  Description of Artificial Sequence: Synthetic peptide
RPEDVPVAP

SEQ ID NO: 42783 - protein, 9 aa, Artificial Sequence
  Description of Artificial Sequence: Synthetic peptide
RSFMCGLIG

SEQ ID NO: 42784 - protein, 9 aa, Artificial Sequence
  Description of Artificial Sequence: Synthetic peptide
RYKSRGALT

SEQ ID NO: 42785 - protein, 9 aa, Artificial Sequence
  Description of Artificial Sequence: Synthetic peptide
SATILANEV

SEQ ID NO: 42786 - protein, 9 aa, Artificial Sequence
  Description of Artificial Sequence: Synthetic peptide
SIVDCQGAF

SEQ ID NO: 42787 - protein, 9 aa, Artificial Sequence
  Description of Artificial Sequence: Synthetic peptide
SLVPVSKTR

SEQ ID NO: 42788 - protein, 9 aa, Artificial Sequence
  Description of Artificial Sequence: Synthetic peptide
SWTCCATQC

SEQ ID NO: 42789 - protein, 9 aa, Artificial Sequence
  Description of Artificial Sequence: Synthetic peptide
SYDEICSTV

SEQ ID NO: 42790 - protein, 9 aa, Artificial Sequence
  Description of Artificial Sequence: Synthetic peptide
TAILNQEIH

SEQ ID NO: 42791 - protein, 9 aa, Artificial Sequence
  Description of Artificial Sequence: Synthetic peptide
TFSPARHPK

SEQ ID NO: 42792 - protein, 9 aa, Artificial Sequence
  Description of Artificial Sequence: Synthetic peptide
TGHPLSNCL

SEQ ID NO: 42793 - protein, 9 aa, Artificial Sequence
  Description of Artificial Sequence: Synthetic peptide
TLGYVWSVG

SEQ ID NO: 42794 - protein, 9 aa, Artificial Sequence
  Description of Artificial Sequence: Synthetic peptide
TNERFTIQC

SEQ ID NO: 42795 - protein, 9 aa, Artificial Sequence
  Description of Artificial Sequence: Synthetic peptide
TQDIWYNYV

SEQ ID NO: 42796 - protein, 9 aa, Artificial Sequence
  Description of Artificial Sequence: Synthetic peptide
VCYCSSTAK

SEQ ID NO: 42797 - protein, 9 aa, Artificial Sequence
  Description of Artificial Sequence: Synthetic peptide
VDQPTTHWG

SEQ ID NO: 42798 - protein, 9 aa, Artificial Sequence
  Description of Artificial Sequence: Synthetic peptide
VHGQYPCQE

SEQ ID NO: 42799 - protein, 9 aa, Artificial Sequence
  Description of Artificial Sequence: Synthetic peptide
VHNWFLTWW

SEQ ID NO: 42800 - protein, 9 aa, Artificial Sequence
  Description of Artificial Sequence: Synthetic peptide
VLTTIWKNN

SEQ ID NO: 42801 - protein, 9 aa, Artificial Sequence
  Description of Artificial Sequence: Synthetic peptide
VNAQQNWGV

SEQ ID NO: 42802 - protein, 9 aa, Artificial Sequence
  Description of Artificial Sequence: Synthetic peptide
WANTQWQDD

SEQ ID NO: 42803 - protein, 9 aa, Artificial Sequence
  Description of Artificial Sequence: Synthetic peptide
WGYNYQCAF

SEQ ID NO: 42804 - protein, 9 aa, Artificial Sequence
  Description of Artificial Sequence: Synthetic peptide
WLKYKKTWI

SEQ ID NO: 42805 - protein, 9 aa, Artificial Sequence
  Description of Artificial Sequence: Synthetic peptide
WPDQNMFAV

SEQ ID NO: 42806 - protein, 9 aa, Artificial Sequence
  Description of Artificial Sequence: Synthetic peptide
WYTFLQFIT

SEQ ID NO: 42807 - protein, 9 aa, Artificial Sequence
  Description of Artificial Sequence: Synthetic peptide
YCNAYMIGM

SEQ ID NO: 42808 - protein, 9 aa, Artificial Sequence
  Description of Artificial Sequence: Synthetic peptide
MEHVVSVQP

SEQ ID NO: 42809 - protein, 9 aa, Artificial Sequence
  Description of Artificial Sequence: Synthetic peptide
NTRFPDQTE

SEQ ID NO: 42810 - protein, 9 aa, Artificial Sequence
  Description of Artificial Sequence: Synthetic peptide
ACLSPDHDR

SEQ ID NO: 42811 - protein, 9 aa, Artificial Sequence
  Description of Artificial Sequence: Synthetic peptide
AMCMLSHIH

SEQ ID NO: 42812 - protein, 9 aa, Artificial Sequence
  Description of Artificial Sequence: Synthetic peptide
ANRNCVTPH

SEQ ID NO: 42813 - protein, 9 aa, Artificial Sequence
  Description of Artificial Sequence: Synthetic peptide
ARMINDNDP

SEQ ID NO: 42814 - protein, 9 aa, Artificial Sequence
  Description of Artificial Sequence: Synthetic peptide
ATWSADVTA

SEQ ID NO: 42815 - protein, 9 aa, Artificial Sequence
  Description of Artificial Sequence: Synthetic peptide
CNFTVCNMS

SEQ ID NO: 42816 - protein, 9 aa, Artificial Sequence
  Description of Artificial Sequence: Synthetic peptide
CTAEMAPMT

SEQ ID NO: 42817 - protein, 9 aa, Artificial Sequence
  Description of Artificial Sequence: Synthetic peptide
CTDGKHASW

SEQ ID NO: 42818 - protein, 9 aa, Artificial Sequence
  Description of Artificial Sequence: Synthetic peptide
DEISDPEEF

SEQ ID NO: 42819 - protein, 9 aa, Artificial Sequence
  Description of Artificial Sequence: Synthetic peptide
DGAQDKWAC

SEQ ID NO: 42820 - protein, 9 aa, Artificial Sequence
  Description of Artificial Sequence: Synthetic peptide
DLIYKGQNG

SEQ ID NO: 42821 - protein, 9 aa, Artificial Sequence
  Description of Artificial Sequence: Synthetic peptide
DRPKRQVLY

SEQ ID NO: 42822 - protein, 9 aa, Artificial Sequence
  Description of Artificial Sequence: Synthetic peptide
DSHIDQFGF

SEQ ID NO: 42823 - protein, 9 aa, Artificial Sequence
  Description of Artificial Sequence: Synthetic peptide
DTEKGQAWW

SEQ ID NO: 42824 - protein, 9 aa, Artificial Sequence
  Description of Artificial Sequence: Synthetic peptide
EDILEITKH

SEQ ID NO: 42825 - protein, 9 aa, Artificial Sequence
  Description of Artificial Sequence: Synthetic peptide
EMAGMREFQ

SEQ ID NO: 42826 - protein, 9 aa, Artificial Sequence
  Description of Artificial Sequence: Synthetic peptide
ENNPSHTQL

SEQ ID NO: 42827 - protein, 9 aa, Artificial Sequence
  Description of Artificial Sequence: Synthetic peptide
EPYKQMGAG

SEQ ID NO: 42828 - protein, 9 aa, Artificial Sequence
  Description of Artificial Sequence: Synthetic peptide
ERTLTKAGS

SEQ ID NO: 42829 - protein, 9 aa, Artificial Sequence
  Description of Artificial Sequence: Synthetic peptide
ETVMMEVRD

SEQ ID NO: 42830 - protein, 9 aa, Artificial Sequence
  Description of Artificial Sequence: Synthetic peptide
EVTKCEPPS

SEQ ID NO: 42831 - protein, 9 aa, Artificial Sequence
  Description of Artificial Sequence: Synthetic peptide
EVTKCGPPS

SEQ ID NO: 42832 - protein, 9 aa, Artificial Sequence
  Description of Artificial Sequence: Synthetic peptide
GQKSYDGCH

SEQ ID NO: 42833 - protein, 9 aa, Artificial Sequence
  Description of Artificial Sequence: Synthetic peptide
GVDNQDFSW

SEQ ID NO: 42834 - protein, 9 aa, Artificial Sequence
  Description of Artificial Sequence: Synthetic peptide
HAKCNRNIK

SEQ ID NO: 42835 - protein, 9 aa, Artificial Sequence
  Description of Artificial Sequence: Synthetic peptide
HQHDDRPDM

SEQ ID NO: 42836 - protein, 9 aa, Artificial Sequence
  Description of Artificial Sequence: Synthetic peptide
HVMEWLQCP

SEQ ID NO: 42837 - protein, 9 aa, Artificial Sequence
  Description of Artificial Sequence: Synthetic peptide
IAGPIEIGM

SEQ ID NO: 42838 - protein, 9 aa, Artificial Sequence
  Description of Artificial Sequence: Synthetic peptide
IKQYPQNKP

SEQ ID NO: 42839 - protein, 9 aa, Artificial Sequence
  Description of Artificial Sequence: Synthetic peptide
IQAVMASGW

SEQ ID NO: 42840 - protein, 9 aa, Artificial Sequence
  Description of Artificial Sequence: Synthetic peptide
ITDEYFMNM

SEQ ID NO: 42841 - protein, 9 aa, Artificial Sequence
  Description of Artificial Sequence: Synthetic peptide
KACSMQQEW

SEQ ID NO: 42842 - protein, 9 aa, Artificial Sequence
  Description of Artificial Sequence: Synthetic peptide
KGVALCDYQ

SEQ ID NO: 42843 - protein, 9 aa, Artificial Sequence
  Description of Artificial Sequence: Synthetic peptide
KIYMQCDQE

SEQ ID NO: 42844 - protein, 9 aa, Artificial Sequence
  Description of Artificial Sequence: Synthetic peptide
KPEWNHTSA

SEQ ID NO: 42845 - protein, 9 aa, Artificial Sequence
  Description of Artificial Sequence: Synthetic peptide
LANHAKMGL

SEQ ID NO: 42846 - protein, 9 aa, Artificial Sequence
  Description of Artificial Sequence: Synthetic peptide
LFSKEKHHR

SEQ ID NO: 42847 - protein, 9 aa, Artificial Sequence
  Description of Artificial Sequence: Synthetic peptide
LMSPYNFLT

SEQ ID NO: 42848 - protein, 9 aa, Artificial Sequence
  Description of Artificial Sequence: Synthetic peptide
LMYQDDMFE

SEQ ID NO: 42849 - protein, 9 aa, Artificial Sequence
  Description of Artificial Sequence: Synthetic peptide
LQHQLHVYE

SEQ ID NO: 42850 - protein, 9 aa, Artificial Sequence
  Description of Artificial Sequence: Synthetic peptide
LSQCQSYVA

SEQ ID NO: 42851 - protein, 9 aa, Artificial Sequence
  Description of Artificial Sequence: Synthetic peptide
LTKPCWPWA

SEQ ID NO: 42852 - protein, 9 aa, Artificial Sequence
  Description of Artificial Sequence: Synthetic peptide
MAAGNTTCA

SEQ ID NO: 42853 - protein, 9 aa, Artificial Sequence
  Description of Artificial Sequence: Synthetic peptide
MCSSDLEGC

SEQ ID NO: 42854 - protein, 9 aa, Artificial Sequence
  Description of Artificial Sequence: Synthetic peptide
MDCCARQAP

SEQ ID NO: 42855 - protein, 9 aa, Artificial Sequence
  Description of Artificial Sequence: Synthetic peptide
MPSCINGPY

SEQ ID NO: 42856 - protein, 9 aa, Artificial Sequence
  Description of Artificial Sequence: Synthetic peptide
MTNRCAKYK

SEQ ID NO: 42857 - protein, 9 aa, Artificial Sequence
  Description of Artificial Sequence: Synthetic peptide
MVTFRENPA

SEQ ID NO: 42858 - protein, 9 aa, Artificial Sequence
  Description of Artificial Sequence: Synthetic peptide
NASVGAWAQ

SEQ ID NO: 42859 - protein, 9 aa, Artificial Sequence
  Description of Artificial Sequence: Synthetic peptide
NEQVATPMA

SEQ ID NO: 42860 - protein, 9 aa, Artificial Sequence
  Description of Artificial Sequence: Synthetic peptide
NIGYMNVLF

SEQ ID NO: 42861 - protein, 9 aa, Artificial Sequence
  Description of Artificial Sequence: Synthetic peptide
NLRECTIMN

SEQ ID NO: 42862 - protein, 9 aa, Artificial Sequence
  Description of Artificial Sequence: Synthetic peptide
NSLLRHGEQ

SEQ ID NO: 42863 - protein, 9 aa, Artificial Sequence
  Description of Artificial Sequence: Synthetic peptide
QLHQCPAVG

SEQ ID NO: 42864 - protein, 9 aa, Artificial Sequence
  Description of Artificial Sequence: Synthetic peptide
QSQPDHVSW

SEQ ID NO: 42865 - protein, 9 aa, Artificial Sequence
  Description of Artificial Sequence: Synthetic peptide
QYECESDNS

SEQ ID NO: 42866 - protein, 9 aa, Artificial Sequence
  Description of Artificial Sequence: Synthetic peptide
RNDYSDQYD

SEQ ID NO: 42867 - protein, 9 aa, Artificial Sequence
  Description of Artificial Sequence: Synthetic peptide
RSDQHSPHM

SEQ ID NO: 42868 - protein, 9 aa, Artificial Sequence
  Description of Artificial Sequence: Synthetic peptide
SCQRNQQTN

SEQ ID NO: 42869 - protein, 9 aa, Artificial Sequence
  Description of Artificial Sequence: Synthetic peptide
SFHNCMLDP

SEQ ID NO: 42870 - protein, 9 aa, Artificial Sequence
  Description of Artificial Sequence: Synthetic peptide
SSTNNQTVD

SEQ ID NO: 42871 - protein, 9 aa, Artificial Sequence
  Description of Artificial Sequence: Synthetic peptide
STCVTEMFY

SEQ ID NO: 42872 - protein, 9 aa, Artificial Sequence
  Description of Artificial Sequence: Synthetic peptide
TCFNQNNTW

SEQ ID NO: 42873 - protein, 9 aa, Artificial Sequence
  Description of Artificial Sequence: Synthetic peptide
TFFQAVVIA

SEQ ID NO: 42874 - protein, 9 aa, Artificial Sequence
  Description of Artificial Sequence: Synthetic peptide
TMASWECYQ

SEQ ID NO: 42875 - protein, 9 aa, Artificial Sequence
  Description of Artificial Sequence: Synthetic peptide
TMDSIQWFE

SEQ ID NO: 42876 - protein, 9 aa, Artificial Sequence
  Description of Artificial Sequence: Synthetic peptide
TQKAHKNPG

SEQ ID NO: 42877 - protein, 9 aa, Artificial Sequence
  Description of Artificial Sequence: Synthetic peptide
TTDSKLLGH

SEQ ID NO: 42878 - protein, 9 aa, Artificial Sequence
  Description of Artificial Sequence: Synthetic peptide
TVEDRRKQG

SEQ ID NO: 42879 - protein, 9 aa, Artificial Sequence
  Description of Artificial Sequence: Synthetic peptide
VADCPHHFD

SEQ ID NO: 42880 - protein, 9 aa, Artificial Sequence
  Description of Artificial Sequence: Synthetic peptide
VHPYAESVD

SEQ ID NO: 42881 - protein, 9 aa, Artificial Sequence
  Description of Artificial Sequence: Synthetic peptide
VVMVQHRTA

SEQ ID NO: 42882 - protein, 9 aa, Artificial Sequence
  Description of Artificial Sequence: Synthetic peptide
VVPHPFPAY

SEQ ID NO: 42883 - protein, 9 aa, Artificial Sequence
  Description of Artificial Sequence: Synthetic peptide
WWEACPAAS

SEQ ID NO: 42884 - protein, 9 aa, Artificial Sequence
  Description of Artificial Sequence: Synthetic peptide
YCTTLSMES

SEQ ID NO: 42885 - protein, 9 aa, Artificial Sequence
  Description of Artificial Sequence: Synthetic peptide
YFVMQWFHY

SEQ ID NO: 42886 - protein, 9 aa, Artificial Sequence
  Description of Artificial Sequence: Synthetic peptide
YMVQDRDEW

SEQ ID NO: 42887 - protein, 9 aa, Artificial Sequence
  Description of Artificial Sequence: Synthetic peptide
YMYSNMQTM

SEQ ID NO: 42888 - protein, 9 aa, Artificial Sequence
  Description of Artificial Sequence: Synthetic peptide
GTSEWMHMA

SEQ ID NO: 42889 - protein, 9 aa, Artificial Sequence
  Description of Artificial Sequence: Synthetic peptide
TVGTAKSQI

SEQ ID NO: 42890 - protein, 9 aa, Artificial Sequence
  Description of Artificial Sequence: Synthetic peptide
DEKFGQVED

SEQ ID NO: 42891 - protein, 9 aa, Artificial Sequence
  Description of Artificial Sequence: Synthetic peptide
GTPDMRLTL

SEQ ID NO: 42892 - protein, 9 aa, Artificial Sequence
  Description of Artificial Sequence: Synthetic peptide
STAFASSWE

SEQ ID NO: 42893 - protein, 9 aa, Artificial Sequence
  Description of Artificial Sequence: Synthetic peptide
HIQCQGDSW

SEQ ID NO: 42894 - protein, 9 aa, Artificial Sequence
  Description of Artificial Sequence: Synthetic peptide
NNDIRIFGN

SEQ ID NO: 42895 - protein, 9 aa, Artificial Sequence
  Description of Artificial Sequence: Synthetic peptide
WAPLPYNWC

SEQ ID NO: 42896 - protein, 9 aa, Artificial Sequence
  Description of Artificial Sequence: Synthetic peptide
LVDGYRMRW

SEQ ID NO: 42897 - protein, 9 aa, Artificial Sequence
  Description of Artificial Sequence: Synthetic peptide
DLCVHANVR

SEQ ID NO: 42898 - protein, 9 aa, Artificial Sequence
  Description of Artificial Sequence: Synthetic peptide
TLLPHWQAT

SEQ ID NO: 42899 - protein, 9 aa, Artificial Sequence
  Description of Artificial Sequence: Synthetic peptide
SIPMGNNWG

SEQ ID NO: 42900 - protein, 9 aa, Artificial Sequence
  Description of Artificial Sequence: Synthetic peptide
FNTLGLLFD

SEQ ID NO: 42901 - protein, 9 aa, Artificial Sequence
  Description of Artificial Sequence: Synthetic peptide
ENMHKMGML

SEQ ID NO: 42902 - protein, 9 aa, Artificial Sequence
  Description of Artificial Sequence: Synthetic peptide
RNSHGWRLD

SEQ ID NO: 42903 - protein, 9 aa, Artificial Sequence
  Description of Artificial Sequence: Synthetic peptide
QCARPWYRS

SEQ ID NO: 42904 - protein, 9 aa, Artificial Sequence
  Description of Artificial Sequence: Synthetic peptide
MWGWPGDAF

SEQ ID NO: 42905 - protein, 9 aa, Artificial Sequence
  Description of Artificial Sequence: Synthetic peptide
KVIRKDSCV

SEQ ID NO: 42906 - protein, 9 aa, Artificial Sequence
  Description of Artificial Sequence: Synthetic peptide
MSPNTKDCT

SEQ ID NO: 42907 - protein, 9 aa, Artificial Sequence
  Description of Artificial Sequence: Synthetic peptide
NGRLWWQRY

SEQ ID NO: 42908 - protein, 9 aa, Artificial Sequence
  Description of Artificial Sequence: Synthetic peptide
TYSQPPVSG

SEQ ID NO: 42909 - protein, 9 aa, Artificial Sequence
  Description of Artificial Sequence: Synthetic peptide
HFTHTESAH

SEQ ID NO: 42910 - protein, 9 aa, Artificial Sequence
  Description of Artificial Sequence: Synthetic peptide
SRFWNRWDF

SEQ ID NO: 42911 - protein, 9 aa, Artificial Sequence
  Description of Artificial Sequence: Synthetic peptide
CLGPWNVKS

SEQ ID NO: 42912 - protein, 9 aa, Artificial Sequence
  Description of Artificial Sequence: Synthetic peptide
CCMSKMPDE

SEQ ID NO: 42913 - protein, 9 aa, Artificial Sequence
  Description of Artificial Sequence: Synthetic peptide
MTHPYWEDS

SEQ ID NO: 42914 - protein, 9 aa, Artificial Sequence
  Description of Artificial Sequence: Synthetic peptide
THNVKTDYP

SEQ ID NO: 42915 - protein, 9 aa, Artificial Sequence
  Description of Artificial Sequence: Synthetic peptide
LDYHFPFEA

SEQ ID NO: 42916 - protein, 9 aa, Artificial Sequence
  Description of Artificial Sequence: Synthetic peptide
WETLEHWRG

SEQ ID NO: 42917 - protein, 9 aa, Artificial Sequence
  Description of Artificial Sequence: Synthetic peptide
DANWRTWQH

SEQ ID NO: 42918 - protein, 9 aa, Artificial Sequence
  Description of Artificial Sequence: Synthetic peptide
CVVPYYRFT

SEQ ID NO: 42919 - protein, 9 aa, Artificial Sequence
  Description of Artificial Sequence: Synthetic peptide
HHEPYGSNC

SEQ ID NO: 42920 - protein, 9 aa, Artificial Sequence
  Description of Artificial Sequence: Synthetic peptide
THHHVLEVP

SEQ ID NO: 42921 - protein, 9 aa, Artificial Sequence
  Description of Artificial Sequence: Synthetic peptide
AAMILESHK

SEQ ID NO: 42922 - protein, 9 aa, Artificial Sequence
  Description of Artificial Sequence: Synthetic peptide
CMRGKWDRL

SEQ ID NO: 42923 - protein, 9 aa, Artificial Sequence
  Description of Artificial Sequence: Synthetic peptide
VTMIYDLHQ

SEQ ID NO: 42924 - protein, 9 aa, Artificial Sequence
  Description of Artificial Sequence: Synthetic peptide
LDHHAEVLQ

SEQ ID NO: 42925 - protein, 9 aa, Artificial Sequence
  Description of Artificial Sequence: Synthetic peptide
MFYPFQCGN

SEQ ID NO: 42926 - protein, 9 aa, Artificial Sequence
  Description of Artificial Sequence: Synthetic peptide
FASHQMNMM

SEQ ID NO: 42927 - protein, 9 aa, Artificial Sequence
  Description of Artificial Sequence: Synthetic peptide
PPESQESST

SEQ ID NO: 42928 - protein, 9 aa, Artificial Sequence
  Description of Artificial Sequence: Synthetic peptide
PDPKAWSNY

SEQ ID NO: 42929 - protein, 9 aa, Artificial Sequence
  Description of Artificial Sequence: Synthetic peptide
IRDLVPAYD

SEQ ID NO: 42930 - protein, 9 aa, Artificial Sequence
  Description of Artificial Sequence: Synthetic peptide
QCPCSRLIC

SEQ ID NO: 42931 - protein, 9 aa, Artificial Sequence
  Description of Artificial Sequence: Synthetic peptide
TICKCTISN

SEQ ID NO: 42932 - protein, 9 aa, Artificial Sequence
  Description of Artificial Sequence: Synthetic peptide
DEEFCEMSA

SEQ ID NO: 42933 - protein, 9 aa, Artificial Sequence
  Description of Artificial Sequence: Synthetic peptide
LPRPGILME

SEQ ID NO: 42934 - protein, 9 aa, Artificial Sequence
  Description of Artificial Sequence: Synthetic peptide
PYGKAAEKL

SEQ ID NO: 42935 - protein, 9 aa, Artificial Sequence
  Description of Artificial Sequence: Synthetic peptide
EKMRYPPMI

SEQ ID NO: 42936 - protein, 9 aa, Artificial Sequence
  Description of Artificial Sequence: Synthetic peptide
SFRCCWDWH

SEQ ID NO: 42937 - protein, 9 aa, Artificial Sequence
  Description of Artificial Sequence: Synthetic peptide
KPPGSRWIT

SEQ ID NO: 42938 - protein, 9 aa, Artificial Sequence
  Description of Artificial Sequence: Synthetic peptide
LACVAHWPS

SEQ ID NO: 42939 - protein, 9 aa, Artificial Sequence
  Description of Artificial Sequence: Synthetic peptide
MSHEMFWVD

SEQ ID NO: 42940 - protein, 9 aa, Artificial Sequence
  Description of Artificial Sequence: Synthetic peptide
KNTMCDNDA

SEQ ID NO: 42941 - protein, 9 aa, Artificial Sequence
  Description of Artificial Sequence: Synthetic peptide
AVKMPVEQS

SEQ ID NO: 42942 - protein, 9 aa, Artificial Sequence
  Description of Artificial Sequence: Synthetic peptide
FTANEDQCH

SEQ ID NO: 42943 - protein, 9 aa, Artificial Sequence
  Description of Artificial Sequence: Synthetic peptide
CRRGQLLYE

SEQ ID NO: 42944 - protein, 9 aa, Artificial Sequence
  Description of Artificial Sequence: Synthetic peptide
DKIMMAEMD

SEQ ID NO: 42945 - protein, 9 aa, Artificial Sequence
  Description of Artificial Sequence: Synthetic peptide
PIAFGCERA

SEQ ID NO: 42946 - protein, 9 aa, Artificial Sequence
  Description of Artificial Sequence: Synthetic peptide
ETGYRENPC

SEQ ID NO: 42947 - protein, 9 aa, Artificial Sequence
  Description of Artificial Sequence: Synthetic peptide
RFADYCKEE

SEQ ID NO: 42948 - protein, 9 aa, Artificial Sequence
  Description of Artificial Sequence: Synthetic peptide
NWVFYTNFP

SEQ ID NO: 42949 - protein, 9 aa, Artificial Sequence
  Description of Artificial Sequence: Synthetic peptide
WECQIQDMK

SEQ ID NO: 42950 - protein, 9 aa, Artificial Sequence
  Description of Artificial Sequence: Synthetic peptide
DIYHFNHRS

SEQ ID NO: 42951 - protein, 9 aa, Artificial Sequence
  Description of Artificial Sequence: Synthetic peptide
NSFANNFVM

SEQ ID NO: 42952 - protein, 9 aa, Artificial Sequence
  Description of Artificial Sequence: Synthetic peptide
DAQWSFEGA

SEQ ID NO: 42953 - protein, 9 aa, Artificial Sequence
  Description of Artificial Sequence: Synthetic peptide
RINCNYGQM

SEQ ID NO: 42954 - protein, 9 aa, Artificial Sequence
  Description of Artificial Sequence: Synthetic peptide
CHPPMTNMG

SEQ ID NO: 42955 - protein, 9 aa, Artificial Sequence
  Description of Artificial Sequence: Synthetic peptide
WPDSNMTGV

SEQ ID NO: 42956 - protein, 9 aa, Artificial Sequence
  Description of Artificial Sequence: Synthetic peptide
QTIMRHAQT

SEQ ID NO: 42957 - protein, 9 aa, Artificial Sequence
  Description of Artificial Sequence: Synthetic peptide
VERLCACQA

SEQ ID NO: 42958 - protein, 9 aa, Artificial Sequence
  Description of Artificial Sequence: Synthetic peptide
VMMYNDSIS

SEQ ID NO: 42959 - protein, 9 aa, Artificial Sequence
  Description of Artificial Sequence: Synthetic peptide
AWDANLAFA

SEQ ID NO: 42960 - protein, 9 aa, Artificial Sequence
  Description of Artificial Sequence: Synthetic peptide
DAGKFGVDI

SEQ ID NO: 42961 - protein, 9 aa, Artificial Sequence
  Description of Artificial Sequence: Synthetic peptide
NQSVCYSSV

SEQ ID NO: 42962 - protein, 9 aa, Artificial Sequence
  Description of Artificial Sequence: Synthetic peptide
LRHDVFSQA

SEQ ID NO: 42963 - protein, 9 aa, Artificial Sequence
  Description of Artificial Sequence: Synthetic peptide
DFAAQQRAQ

SEQ ID NO: 42964 - protein, 9 aa, Artificial Sequence
  Description of Artificial Sequence: Synthetic peptide
SAGPFFDHY

SEQ ID NO: 42965 - protein, 9 aa, Artificial Sequence
  Description of Artificial Sequence: Synthetic peptide
CMASVNYFD

SEQ ID NO: 42966 - protein, 9 aa, Artificial Sequence
  Description of Artificial Sequence: Synthetic peptide
CWARMQGYM

SEQ ID NO: 42967 - protein, 9 aa, Artificial Sequence
  Description of Artificial Sequence: Synthetic peptide
CFVDSVFMY

SEQ ID NO: 42968 - protein, 9 aa, Artificial Sequence
  Description of Artificial Sequence: Synthetic peptide
APRNVHCGT

SEQ ID NO: 42969 - protein, 9 aa, Artificial Sequence
  Description of Artificial Sequence: Synthetic peptide
GRCFMPPGR

SEQ ID NO: 42970 - protein, 9 aa, Artificial Sequence
  Description of Artificial Sequence: Synthetic peptide
KNHAHEFIE

SEQ ID NO: 42971 - protein, 9 aa, Artificial Sequence
  Description of Artificial Sequence: Synthetic peptide
IIAVSMRGR

SEQ ID NO: 42972 - protein, 9 aa, Artificial Sequence
  Description of Artificial Sequence: Synthetic peptide
LPRMPECSV

SEQ ID NO: 42973 - protein, 9 aa, Artificial Sequence
  Description of Artificial Sequence: Synthetic peptide
TTMVQMGAW

SEQ ID NO: 42974 - protein, 9 aa, Artificial Sequence
  Description of Artificial Sequence: Synthetic peptide
TLVSCDQGN

SEQ ID NO: 42975 - protein, 9 aa, Artificial Sequence
  Description of Artificial Sequence: Synthetic peptide
SADRMISHE

SEQ ID NO: 42976 - protein, 9 aa, Artificial Sequence
  Description of Artificial Sequence: Synthetic peptide
MPHHSPDCW

SEQ ID NO: 42977 - protein, 9 aa, Artificial Sequence
  Description of Artificial Sequence: Synthetic peptide
TPSQMDMDT

SEQ ID NO: 42978 - protein, 9 aa, Artificial Sequence
  Description of Artificial Sequence: Synthetic peptide
SCNFEFLWM

SEQ ID NO: 42979 - protein, 9 aa, Artificial Sequence
  Description of Artificial Sequence: Synthetic peptide
TTVDYAGTG

SEQ ID NO: 42980 - protein, 9 aa, Artificial Sequence
  Description of Artificial Sequence: Synthetic peptide
WKCCQDQLL

SEQ ID NO: 42981 - protein, 9 aa, Artificial Sequence
  Description of Artificial Sequence: Synthetic peptide
SWFAGQWEW

SEQ ID NO: 42982 - protein, 9 aa, Artificial Sequence
  Description of Artificial Sequence: Synthetic peptide
EITDKYWGE

SEQ ID NO: 42983 - protein, 9 aa, Artificial Sequence
  Description of Artificial Sequence: Synthetic peptide
CRGSLSNAN

SEQ ID NO: 42984 - protein, 9 aa, Artificial Sequence
  Description of Artificial Sequence: Synthetic peptide
KAYMMMEGP

SEQ ID NO: 42985 - protein, 9 aa, Artificial Sequence
  Description of Artificial Sequence: Synthetic peptide
VPLGFNFAG

SEQ ID NO: 42986 - protein, 9 aa, Artificial Sequence
  Description of Artificial Sequence: Synthetic peptide
AVSNWLETS

SEQ ID NO: 42987 - protein, 9 aa, Artificial Sequence
  Description of Artificial Sequence: Synthetic peptide
MWTVARMFP

SEQ ID NO: 42988 - protein, 9 aa, Artificial Sequence
  Description of Artificial Sequence: Synthetic peptide
ITHKYGWNL

SEQ ID NO: 42989 - protein, 9 aa, Artificial Sequence
  Description of Artificial Sequence: Synthetic peptide
QGRWACWYS

SEQ ID NO: 42990 - protein, 9 aa, Artificial Sequence
  Description of Artificial Sequence: Synthetic peptide
NHASFKRFM

SEQ ID NO: 42991 - protein, 9 aa, Artificial Sequence
  Description of Artificial Sequence: Synthetic peptide
RNMALHHPT

SEQ ID NO: 42992 - protein, 9 aa, Artificial Sequence
  Description of Artificial Sequence: Synthetic peptide
MWTKFNEYG

SEQ ID NO: 42993 - protein, 9 aa, Artificial Sequence
  Description of Artificial Sequence: Synthetic peptide
HLLKKDASD

SEQ ID NO: 42994 - protein, 9 aa, Artificial Sequence
  Description of Artificial Sequence: Synthetic peptide
GQAGVHNLS

SEQ ID NO: 42995 - protein, 9 aa, Artificial Sequence
  Description of Artificial Sequence: Synthetic peptide
SFFREDYSF

SEQ ID NO: 42996 - protein, 9 aa, Artificial Sequence
  Description of Artificial Sequence: Synthetic peptide
RCTDCSYFY

SEQ ID NO: 42997 - protein, 9 aa, Artificial Sequence
  Description of Artificial Sequence: Synthetic peptide
IKRAYDNNG

SEQ ID NO: 42998 - protein, 9 aa, Artificial Sequence
  Description of Artificial Sequence: Synthetic peptide
SQQHCQHDQ

SEQ ID NO: 42999 - protein, 9 aa, Artificial Sequence
  Description of Artificial Sequence: Synthetic peptide
QGDFFNICP

SEQ ID NO: 43000 - protein, 9 aa, Artificial Sequence
  Description of Artificial Sequence: Synthetic peptide
CMQKYIPDV

SEQ ID NO: 43001 - protein, 9 aa, Artificial Sequence
  Description of Artificial Sequence: Synthetic peptide
PSLWKEKVW

SEQ ID NO: 43002 - protein, 9 aa, Artificial Sequence
  Description of Artificial Sequence: Synthetic peptide
YGTAMDSLY

SEQ ID NO: 43003 - protein, 9 aa, Artificial Sequence
  Description of Artificial Sequence: Synthetic peptide
IHQCIVCAP

SEQ ID NO: 43004 - protein, 9 aa, Artificial Sequence
  Description of Artificial Sequence: Synthetic peptide
HLAPYCQQE

SEQ ID NO: 43005 - protein, 9 aa, Artificial Sequence
  Description of Artificial Sequence: Synthetic peptide
LMQSGQKDF

SEQ ID NO: 43006 - protein, 9 aa, Artificial Sequence
  Description of Artificial Sequence: Synthetic peptide
EVDQYYSLA

SEQ ID NO: 43007 - protein, 9 aa, Artificial Sequence
  Description of Artificial Sequence: Synthetic peptide
KIQMAVSLD

SEQ ID NO: 43008 - protein, 9 aa, Artificial Sequence
  Description of Artificial Sequence: Synthetic peptide
LINQWMHDN

SEQ ID NO: 43009 - protein, 9 aa, Artificial Sequence
  Description of Artificial Sequence: Synthetic peptide
HTHDVRVHK

SEQ ID NO: 43010 - protein, 9 aa, Artificial Sequence
  Description of Artificial Sequence: Synthetic peptide
MPASNWVAE

SEQ ID NO: 43011 - protein, 9 aa, Artificial Sequence
  Description of Artificial Sequence: Synthetic peptide
RTVHRDDFA

SEQ ID NO: 43012 - protein, 9 aa, Artificial Sequence
  Description of Artificial Sequence: Synthetic peptide
TSRDGGWAY

SEQ ID NO: 43013 - protein, 9 aa, Artificial Sequence
  Description of Artificial Sequence: Synthetic peptide
KNETFIAST

SEQ ID NO: 43014 - protein, 9 aa, Artificial Sequence
  Description of Artificial Sequence: Synthetic peptide
EVAGCATAV

SEQ ID NO: 43015 - protein, 9 aa, Artificial Sequence
  Description of Artificial Sequence: Synthetic peptide
MWTEFNEDG

SEQ ID NO: 43016 - protein, 9 aa, Artificial Sequence
  Description of Artificial Sequence: Synthetic peptide
QPGHTYNAP

SEQ ID NO: 43017 - protein, 9 aa, Artificial Sequence
  Description of Artificial Sequence: Synthetic peptide
MESHHHAHA

SEQ ID NO: 43018 - protein, 9 aa, Artificial Sequence
  Description of Artificial Sequence: Synthetic peptide
DCVCCSELV

SEQ ID NO: 43019 - protein, 9 aa, Artificial Sequence
  Description of Artificial Sequence: Synthetic peptide
TKQPVHFLG

SEQ ID NO: 43020 - protein, 9 aa, Artificial Sequence
  Description of Artificial Sequence: Synthetic peptide
AMNWWDAPQ

SEQ ID NO: 43021 - protein, 9 aa, Artificial Sequence
  Description of Artificial Sequence: Synthetic peptide
YFMTCSTYP

SEQ ID NO: 43022 - protein, 9 aa, Artificial Sequence
  Description of Artificial Sequence: Synthetic peptide
GSFMSCEKN

SEQ ID NO: 43023 - protein, 9 aa, Artificial Sequence
  Description of Artificial Sequence: Synthetic peptide
VDQHGWNDM

SEQ ID NO: 43024 - protein, 9 aa, Artificial Sequence
  Description of Artificial Sequence: Synthetic peptide
HHSWQPQKY

SEQ ID NO: 43025 - protein, 9 aa, Artificial Sequence
  Description of Artificial Sequence: Synthetic peptide
QFCTSCASN

SEQ ID NO: 43026 - protein, 9 aa, Artificial Sequence
  Description of Artificial Sequence: Synthetic peptide
KMLLVMDGD

SEQ ID NO: 43027 - protein, 9 aa, Artificial Sequence
  Description of Artificial Sequence: Synthetic peptide
ERTCIATMW

SEQ ID NO: 43028 - protein, 9 aa, Artificial Sequence
  Description of Artificial Sequence: Synthetic peptide
GVDNRQWLF

SEQ ID NO: 43029 - protein, 9 aa, Artificial Sequence
  Description of Artificial Sequence: Synthetic peptide
NEAPYSTWQ

SEQ ID NO: 43030 - protein, 9 aa, Artificial Sequence
  Description of Artificial Sequence: Synthetic peptide
SGNIDVHTM

SEQ ID NO: 43031 - protein, 9 aa, Artificial Sequence
  Description of Artificial Sequence: Synthetic peptide
AADNYSWVV

SEQ ID NO: 43032 - protein, 9 aa, Artificial Sequence
  Description of Artificial Sequence: Synthetic peptide
AAHRGECMA

SEQ ID NO: 43033 - protein, 9 aa, Artificial Sequence
  Description of Artificial Sequence: Synthetic peptide
AAVPRMWAM

SEQ ID NO: 43034 - protein, 9 aa, Artificial Sequence
  Description of Artificial Sequence: Synthetic peptide
AAWGYNQFF

SEQ ID NO: 43035 - protein, 9 aa, Artificial Sequence
  Description of Artificial Sequence: Synthetic peptide
AAWVDKWWV

SEQ ID NO: 43036 - protein, 9 aa, Artificial Sequence
  Description of Artificial Sequence: Synthetic peptide
AAYMSSECL

SEQ ID NO: 43037 - protein, 9 aa, Artificial Sequence
  Description of Artificial Sequence: Synthetic peptide
ACCCHENVL

SEQ ID NO: 43038 - protein, 9 aa, Artificial Sequence
  Description of Artificial Sequence: Synthetic peptide
ACEHPLNYD

SEQ ID NO: 43039 - protein, 9 aa, Artificial Sequence
  Description of Artificial Sequence: Synthetic peptide
ACGVTQMNP

SEQ ID NO: 43040 - protein, 9 aa, Artificial Sequence
  Description of Artificial Sequence: Synthetic peptide
ACQYDVETL

SEQ ID NO: 43041 - protein, 9 aa, Artificial Sequence
  Description of Artificial Sequence: Synthetic peptide
AEDVDEGCD

SEQ ID NO: 43042 - protein, 9 aa, Artificial Sequence
  Description of Artificial Sequence: Synthetic peptide
AEIRNVACW

SEQ ID NO: 43043 - protein, 9 aa, Artificial Sequence
  Description of Artificial Sequence: Synthetic peptide
AFFMDHMWH

SEQ ID NO: 43044 - protein, 9 aa, Artificial Sequence
  Description of Artificial Sequence: Synthetic peptide
AGINCQWCP

SEQ ID NO: 43045 - protein, 9 aa, Artificial Sequence
  Description of Artificial Sequence: Synthetic peptide
AHFPFFVYW

SEQ ID NO: 43046 - protein, 9 aa, Artificial Sequence
  Description of Artificial Sequence: Synthetic peptide
AIFSREENG

SEQ ID NO: 43047 - protein, 9 aa, Artificial Sequence
  Description of Artificial Sequence: Synthetic peptide
AIGIDHQAF

SEQ ID NO: 43048 - protein, 9 aa, Artificial Sequence
  Description of Artificial Sequence: Synthetic peptide
AIGNFHMAY

SEQ ID NO: 43049 - protein, 9 aa, Artificial Sequence
  Description of Artificial Sequence: Synthetic peptide
AIIWGAIQE

SEQ ID NO: 43050 - protein, 9 aa, Artificial Sequence
  Description of Artificial Sequence: Synthetic peptide
AIQMPDVTY

SEQ ID NO: 43051 - protein, 9 aa, Artificial Sequence
  Description of Artificial Sequence: Synthetic peptide
AKDMHVANE

SEQ ID NO: 43052 - protein, 9 aa, Artificial Sequence
  Description of Artificial Sequence: Synthetic peptide
AKLSNCAIP

SEQ ID NO: 43053 - protein, 9 aa, Artificial Sequence
  Description of Artificial Sequence: Synthetic peptide
AKMGFDRFT

SEQ ID NO: 43054 - protein, 9 aa, Artificial Sequence
  Description of Artificial Sequence: Synthetic peptide
AKSHHDDSA

SEQ ID NO: 43055 - protein, 9 aa, Artificial Sequence
  Description of Artificial Sequence: Synthetic peptide
ALEYIRQGT

SEQ ID NO: 43056 - protein, 9 aa, Artificial Sequence
  Description of Artificial Sequence: Synthetic peptide
ALHHYPVYH

SEQ ID NO: 43057 - protein, 9 aa, Artificial Sequence
  Description of Artificial Sequence: Synthetic peptide
ALHVVMDVG

SEQ ID NO: 43058 - protein, 9 aa, Artificial Sequence
  Description of Artificial Sequence: Synthetic peptide
AMDYLMEHV

SEQ ID NO: 43059 - protein, 9 aa, Artificial Sequence
  Description of Artificial Sequence: Synthetic peptide
AMGNQRNYY

SEQ ID NO: 43060 - protein, 9 aa, Artificial Sequence
  Description of Artificial Sequence: Synthetic peptide
AMHAQQNRE

SEQ ID NO: 43061 - protein, 9 aa, Artificial Sequence
  Description of Artificial Sequence: Synthetic peptide
AMIASHHCQ

SEQ ID NO: 43062 - protein, 9 aa, Artificial Sequence
  Description of Artificial Sequence: Synthetic peptide
AMKFAGECA

SEQ ID NO: 43063 - protein, 9 aa, Artificial Sequence
  Description of Artificial Sequence: Synthetic peptide
AMKFAGEGA

SEQ ID NO: 43064 - protein, 9 aa, Artificial Sequence
  Description of Artificial Sequence: Synthetic peptide
AMMHRNNET

SEQ ID NO: 43065 - protein, 9 aa, Artificial Sequence
  Description of Artificial Sequence: Synthetic peptide
ANAYQINGQ

SEQ ID NO: 43066 - protein, 9 aa, Artificial Sequence
  Description of Artificial Sequence: Synthetic peptide
ANCMDFHIT

SEQ ID NO: 43067 - protein, 9 aa, Artificial Sequence
  Description of Artificial Sequence: Synthetic peptide
ANFYNEEAT

SEQ ID NO: 43068 - protein, 9 aa, Artificial Sequence
  Description of Artificial Sequence: Synthetic peptide
ANHHQTYDT

SEQ ID NO: 43069 - protein, 9 aa, Artificial Sequence
  Description of Artificial Sequence: Synthetic peptide
ANQISVRGV

SEQ ID NO: 43070 - protein, 9 aa, Artificial Sequence
  Description of Artificial Sequence: Synthetic peptide
APCWEGSMR

SEQ ID NO: 43071 - protein, 9 aa, Artificial Sequence
  Description of Artificial Sequence: Synthetic peptide
APESARPAN

SEQ ID NO: 43072 - protein, 9 aa, Artificial Sequence
  Description of Artificial Sequence: Synthetic peptide
APIWNDSLM

SEQ ID NO: 43073 - protein, 9 aa, Artificial Sequence
  Description of Artificial Sequence: Synthetic peptide
APQVSKRFA

SEQ ID NO: 43074 - protein, 9 aa, Artificial Sequence
  Description of Artificial Sequence: Synthetic peptide
APSTFANWG

SEQ ID NO: 43075 - protein, 9 aa, Artificial Sequence
  Description of Artificial Sequence: Synthetic peptide
APVNMENPI

SEQ ID NO: 43076 - protein, 9 aa, Artificial Sequence
  Description of Artificial Sequence: Synthetic peptide
AQQCSRLMF

SEQ ID NO: 43077 - protein, 9 aa, Artificial Sequence
  Description of Artificial Sequence: Synthetic peptide
AQRPCDDWQ

SEQ ID NO: 43078 - protein, 9 aa, Artificial Sequence
  Description of Artificial Sequence: Synthetic peptide
AQTMSHCFW

SEQ ID NO: 43079 - protein, 9 aa, Artificial Sequence
  Description of Artificial Sequence: Synthetic peptide
ARAAQLSYW

SEQ ID NO: 43080 - protein, 9 aa, Artificial Sequence
  Description of Artificial Sequence: Synthetic peptide
ARQCNPNCT

SEQ ID NO: 43081 - protein, 9 aa, Artificial Sequence
  Description of Artificial Sequence: Synthetic peptide
ASLDQAEQN

SEQ ID NO: 43082 - protein, 9 aa, Artificial Sequence
  Description of Artificial Sequence: Synthetic peptide
ATENEHAMP

SEQ ID NO: 43083 - protein, 9 aa, Artificial Sequence
  Description of Artificial Sequence: Synthetic peptide
ATNQRKAYT

SEQ ID NO: 43084 - protein, 9 aa, Artificial Sequence
  Description of Artificial Sequence: Synthetic peptide
ATTNMFVDT

SEQ ID NO: 43085 - protein, 9 aa, Artificial Sequence
  Description of Artificial Sequence: Synthetic peptide
ATVKYNCHW

SEQ ID NO: 43086 - protein, 9 aa, Artificial Sequence
  Description of Artificial Sequence: Synthetic peptide
AVAFGSQED

SEQ ID NO: 43087 - protein, 9 aa, Artificial Sequence
  Description of Artificial Sequence: Synthetic peptide
AVGFCQYSS

SEQ ID NO: 43088 - protein, 9 aa, Artificial Sequence
  Description of Artificial Sequence: Synthetic peptide
AVNHTPIWA

SEQ ID NO: 43089 - protein, 9 aa, Artificial Sequence
  Description of Artificial Sequence: Synthetic peptide
AVNYGHEGG

SEQ ID NO: 43090 - protein, 9 aa, Artificial Sequence
  Description of Artificial Sequence: Synthetic peptide
AVTDKCDNP

SEQ ID NO: 43091 - protein, 9 aa, Artificial Sequence
  Description of Artificial Sequence: Synthetic peptide
AVTSYDNMQ

SEQ ID NO: 43092 - protein, 9 aa, Artificial Sequence
  Description of Artificial Sequence: Synthetic peptide
AWTLNNNHW

SEQ ID NO: 43093 - protein, 9 aa, Artificial Sequence
  Description of Artificial Sequence: Synthetic peptide
AYTDIWNFW

SEQ ID NO: 43094 - protein, 9 aa, Artificial Sequence
  Description of Artificial Sequence: Synthetic peptide
CAAMAYEKG

SEQ ID NO: 43095 - protein, 9 aa, Artificial Sequence
  Description of Artificial Sequence: Synthetic peptide
CAEVQGETS

SEQ ID NO: 43096 - protein, 9 aa, Artificial Sequence
  Description of Artificial Sequence: Synthetic peptide
CASGFGRLA

SEQ ID NO: 43097 - protein, 9 aa, Artificial Sequence
  Description of Artificial Sequence: Synthetic peptide
CAWVMQWHH

SEQ ID NO: 43098 - protein, 9 aa, Artificial Sequence
  Description of Artificial Sequence: Synthetic peptide
CCHFDEFYM

SEQ ID NO: 43099 - protein, 9 aa, Artificial Sequence
  Description of Artificial Sequence: Synthetic peptide
CDNSENFLT

SEQ ID NO: 43100 - protein, 9 aa, Artificial Sequence
  Description of Artificial Sequence: Synthetic peptide
CDTRWYCLC

SEQ ID NO: 43101 - protein, 9 aa, Artificial Sequence
  Description of Artificial Sequence: Synthetic peptide
CEAEKVEQP

SEQ ID NO: 43102 - protein, 9 aa, Artificial Sequence
  Description of Artificial Sequence: Synthetic peptide
CEGVANPWE

SEQ ID NO: 43103 - protein, 9 aa, Artificial Sequence
  Description of Artificial Sequence: Synthetic peptide
CFPLCSFST

SEQ ID NO: 43104 - protein, 9 aa, Artificial Sequence
  Description of Artificial Sequence: Synthetic peptide
CFTPHESMQ

SEQ ID NO: 43105 - protein, 9 aa, Artificial Sequence
  Description of Artificial Sequence: Synthetic peptide
CGESWAGFN

SEQ ID NO: 43106 - protein, 9 aa, Artificial Sequence
  Description of Artificial Sequence: Synthetic peptide
CGPNVSMMP

SEQ ID NO: 43107 - protein, 9 aa, Artificial Sequence
  Description of Artificial Sequence: Synthetic peptide
CGVVESGMN

SEQ ID NO: 43108 - protein, 9 aa, Artificial Sequence
  Description of Artificial Sequence: Synthetic peptide
CHKPYHLGI

SEQ ID NO: 43109 - protein, 9 aa, Artificial Sequence
  Description of Artificial Sequence: Synthetic peptide
CHYEYSKFG

SEQ ID NO: 43110 - protein, 9 aa, Artificial Sequence
  Description of Artificial Sequence: Synthetic peptide
CIETVHKHF

SEQ ID NO: 43111 - protein, 9 aa, Artificial Sequence
  Description of Artificial Sequence: Synthetic peptide
CIWPYQAIQ

SEQ ID NO: 43112 - protein, 9 aa, Artificial Sequence
  Description of Artificial Sequence: Synthetic peptide
CKPLECQLV

SEQ ID NO: 43113 - protein, 9 aa, Artificial Sequence
  Description of Artificial Sequence: Synthetic peptide
CLCLIVDCE

SEQ ID NO: 43114 - protein, 9 aa, Artificial Sequence
  Description of Artificial Sequence: Synthetic peptide
CLLGEVMFD

SEQ ID NO: 43115 - protein, 9 aa, Artificial Sequence
  Description of Artificial Sequence: Synthetic peptide
CLTDSQDLP

SEQ ID NO: 43116 - protein, 9 aa, Artificial Sequence
  Description of Artificial Sequence: Synthetic peptide
CMHWGWIPM

SEQ ID NO: 43117 - protein, 9 aa, Artificial Sequence
  Description of Artificial Sequence: Synthetic peptide
CMKIFKFNS

SEQ ID NO: 43118 - protein, 9 aa, Artificial Sequence
  Description of Artificial Sequence: Synthetic peptide
CMMTYMHLG

SEQ ID NO: 43119 - protein, 9 aa, Artificial Sequence
  Description of Artificial Sequence: Synthetic peptide
CMNCRHQCL

SEQ ID NO: 43120 - protein, 9 aa, Artificial Sequence
  Description of Artificial Sequence: Synthetic peptide
CMQKIDHSW

SEQ ID NO: 43121 - protein, 9 aa, Artificial Sequence
  Description of Artificial Sequence: Synthetic peptide
CMSVSTRWY

SEQ ID NO: 43122 - protein, 9 aa, Artificial Sequence
  Description of Artificial Sequence: Synthetic peptide
CMVCPGREE

SEQ ID NO: 43123 - protein, 9 aa, Artificial Sequence
  Description of Artificial Sequence: Synthetic peptide
CNDRYMFAH

SEQ ID NO: 43124 - protein, 9 aa, Artificial Sequence
  Description of Artificial Sequence: Synthetic peptide
CPCTFADEQ

SEQ ID NO: 43125 - protein, 9 aa, Artificial Sequence
  Description of Artificial Sequence: Synthetic peptide
CPKPSDGSF

SEQ ID NO: 43126 - protein, 9 aa, Artificial Sequence
  Description of Artificial Sequence: Synthetic peptide
CPLTSWHFE

SEQ ID NO: 43127 - protein, 9 aa, Artificial Sequence
  Description of Artificial Sequence: Synthetic peptide
CQHRTHCCM

SEQ ID NO: 43128 - protein, 9 aa, Artificial Sequence
  Description of Artificial Sequence: Synthetic peptide
CQIPEGHEG

SEQ ID NO: 43129 - protein, 9 aa, Artificial Sequence
  Description of Artificial Sequence: Synthetic peptide
CQVKRNATG

SEQ ID NO: 43130 - protein, 9 aa, Artificial Sequence
  Description of Artificial Sequence: Synthetic peptide
CSLRLIAES

SEQ ID NO: 43131 - protein, 9 aa, Artificial Sequence
  Description of Artificial Sequence: Synthetic peptide
CTALCYSRQ

SEQ ID NO: 43132 - protein, 9 aa, Artificial Sequence
  Description of Artificial Sequence: Synthetic peptide
CTVIDINKN

SEQ ID NO: 43133 - protein, 9 aa, Artificial Sequence
  Description of Artificial Sequence: Synthetic peptide
CTWLTQHQF

SEQ ID NO: 43134 - protein, 9 aa, Artificial Sequence
  Description of Artificial Sequence: Synthetic peptide
CVAIENVNF

SEQ ID NO: 43135 - protein, 9 aa, Artificial Sequence
  Description of Artificial Sequence: Synthetic peptide
CVRQTVTLC

SEQ ID NO: 43136 - protein, 9 aa, Artificial Sequence
  Description of Artificial Sequence: Synthetic peptide
CVSHYASQM

SEQ ID NO: 43137 - protein, 9 aa, Artificial Sequence
  Description of Artificial Sequence: Synthetic peptide
CWPFAINHI

SEQ ID NO: 43138 - protein, 9 aa, Artificial Sequence
  Description of Artificial Sequence: Synthetic peptide
CWTMFCPPT

SEQ ID NO: 43139 - protein, 9 aa, Artificial Sequence
  Description of Artificial Sequence: Synthetic peptide
CWTQMKFWG

SEQ ID NO: 43140 - protein, 9 aa, Artificial Sequence
  Description of Artificial Sequence: Synthetic peptide
CYHQYETRC

SEQ ID NO: 43141 - protein, 9 aa, Artificial Sequence
  Description of Artificial Sequence: Synthetic peptide
CYKSTQGAE

SEQ ID NO: 43142 - protein, 9 aa, Artificial Sequence
  Description of Artificial Sequence: Synthetic peptide
DAGDENAPE

SEQ ID NO: 43143 - protein, 9 aa, Artificial Sequence
  Description of Artificial Sequence: Synthetic peptide
DAKMGAEFS

SEQ ID NO: 43144 - protein, 9 aa, Artificial Sequence
  Description of Artificial Sequence: Synthetic peptide
DAKNECASW

SEQ ID NO: 43145 - protein, 9 aa, Artificial Sequence
  Description of Artificial Sequence: Synthetic peptide
DALLHRHYE

SEQ ID NO: 43146 - protein, 9 aa, Artificial Sequence
  Description of Artificial Sequence: Synthetic peptide
DAREYWRYQ

SEQ ID NO: 43147 - protein, 9 aa, Artificial Sequence
  Description of Artificial Sequence: Synthetic peptide
DASPKGGAS

SEQ ID NO: 43148 - protein, 9 aa, Artificial Sequence
  Description of Artificial Sequence: Synthetic peptide
DAWLHEQGT

SEQ ID NO: 43149 - protein, 9 aa, Artificial Sequence
  Description of Artificial Sequence: Synthetic peptide
DCNAADPGR

SEQ ID NO: 43150 - protein, 9 aa, Artificial Sequence
  Description of Artificial Sequence: Synthetic peptide
DCQYVVNDC

SEQ ID NO: 43151 - protein, 9 aa, Artificial Sequence
  Description of Artificial Sequence: Synthetic peptide
DCRMCERHV

SEQ ID NO: 43152 - protein, 9 aa, Artificial Sequence
  Description of Artificial Sequence: Synthetic peptide
DCRWMSIMG

SEQ ID NO: 43153 - protein, 9 aa, Artificial Sequence
  Description of Artificial Sequence: Synthetic peptide
DDGKTYCLY

SEQ ID NO: 43154 - protein, 9 aa, Artificial Sequence
  Description of Artificial Sequence: Synthetic peptide
DDRNVWSAD

SEQ ID NO: 43155 - protein, 9 aa, Artificial Sequence
  Description of Artificial Sequence: Synthetic peptide
DDVRQGDCW

SEQ ID NO: 43156 - protein, 9 aa, Artificial Sequence
  Description of Artificial Sequence: Synthetic peptide
DEIDIGREG

SEQ ID NO: 43157 - protein, 9 aa, Artificial Sequence
  Description of Artificial Sequence: Synthetic peptide
DEMLKQFNG

SEQ ID NO: 43158 - protein, 9 aa, Artificial Sequence
  Description of Artificial Sequence: Synthetic peptide
DFNVTAFRD

SEQ ID NO: 43159 - protein, 9 aa, Artificial Sequence
  Description of Artificial Sequence: Synthetic peptide
DFVGCSHWG

SEQ ID NO: 43160 - protein, 9 aa, Artificial Sequence
  Description of Artificial Sequence: Synthetic peptide
DGTPISCVG

SEQ ID NO: 43161 - protein, 9 aa, Artificial Sequence
  Description of Artificial Sequence: Synthetic peptide
DHDDTRLHR

SEQ ID NO: 43162 - protein, 9 aa, Artificial Sequence
  Description of Artificial Sequence: Synthetic peptide
DHDKREIVT

SEQ ID NO: 43163 - protein, 9 aa, Artificial Sequence
  Description of Artificial Sequence: Synthetic peptide
DHFYIAKQY

SEQ ID NO: 43164 - protein, 9 aa, Artificial Sequence
  Description of Artificial Sequence: Synthetic peptide
DHGFEGGWP

SEQ ID NO: 43165 - protein, 9 aa, Artificial Sequence
  Description of Artificial Sequence: Synthetic peptide
DIWHTQDME

SEQ ID NO: 43166 - protein, 9 aa, Artificial Sequence
  Description of Artificial Sequence: Synthetic peptide
DKAQIKMYG

SEQ ID NO: 43167 - protein, 9 aa, Artificial Sequence
  Description of Artificial Sequence: Synthetic peptide
DKDEHDTQD

SEQ ID NO: 43168 - protein, 9 aa, Artificial Sequence
  Description of Artificial Sequence: Synthetic peptide
DKKQSCDTS

SEQ ID NO: 43169 - protein, 9 aa, Artificial Sequence
  Description of Artificial Sequence: Synthetic peptide
DKQLMMLHT

SEQ ID NO: 43170 - protein, 9 aa, Artificial Sequence
  Description of Artificial Sequence: Synthetic peptide
DKRWQKMVR

SEQ ID NO: 43171 - protein, 9 aa, Artificial Sequence
  Description of Artificial Sequence: Synthetic peptide
DKSQMHKWG

SEQ ID NO: 43172 - protein, 9 aa, Artificial Sequence
  Description of Artificial Sequence: Synthetic peptide
DLCFMEQLH

SEQ ID NO: 43173 - protein, 9 aa, Artificial Sequence
  Description of Artificial Sequence: Synthetic peptide
DLEVTSASQ

SEQ ID NO: 43174 - protein, 9 aa, Artificial Sequence
  Description of Artificial Sequence: Synthetic peptide
DLHDVVFVV

SEQ ID NO: 43175 - protein, 9 aa, Artificial Sequence
  Description of Artificial Sequence: Synthetic peptide
DMHGIENAR

SEQ ID NO: 43176 - protein, 9 aa, Artificial Sequence
  Description of Artificial Sequence: Synthetic peptide
DMPEDSIHW

SEQ ID NO: 43177 - protein, 9 aa, Artificial Sequence
  Description of Artificial Sequence: Synthetic peptide
DNKSIVMSQ

SEQ ID NO: 43178 - protein, 9 aa, Artificial Sequence
  Description of Artificial Sequence: Synthetic peptide
DNNVQKCGQ

SEQ ID NO: 43179 - protein, 9 aa, Artificial Sequence
  Description of Artificial Sequence: Synthetic peptide
DNQPTVCHT

SEQ ID NO: 43180 - protein, 9 aa, Artificial Sequence
  Description of Artificial Sequence: Synthetic peptide
DNRPPLFWQ

SEQ ID NO: 43181 - protein, 9 aa, Artificial Sequence
  Description of Artificial Sequence: Synthetic peptide
DPEYTVVLT

SEQ ID NO: 43182 - protein, 9 aa, Artificial Sequence
  Description of Artificial Sequence: Synthetic peptide
DQHPSFLGC

SEQ ID NO: 43183 - protein, 9 aa, Artificial Sequence
  Description of Artificial Sequence: Synthetic peptide
DQNESGFGC

SEQ ID NO: 43184 - protein, 9 aa, Artificial Sequence
  Description of Artificial Sequence: Synthetic peptide
DQWQATIAE

SEQ ID NO: 43185 - protein, 9 aa, Artificial Sequence
  Description of Artificial Sequence: Synthetic peptide
DRCQTVIDW

SEQ ID NO: 43186 - protein, 9 aa, Artificial Sequence
  Description of Artificial Sequence: Synthetic peptide
DRKCMIPNK

SEQ ID NO: 43187 - protein, 9 aa, Artificial Sequence
  Description of Artificial Sequence: Synthetic peptide
DRQQMDCYQ

SEQ ID NO: 43188 - protein, 9 aa, Artificial Sequence
  Description of Artificial Sequence: Synthetic peptide
DRTPLHQQQ

SEQ ID NO: 43189 - protein, 9 aa, Artificial Sequence
  Description of Artificial Sequence: Synthetic peptide
DSAELHWPH

SEQ ID NO: 43190 - protein, 9 aa, Artificial Sequence
  Description of Artificial Sequence: Synthetic peptide
DSFTFLKKA

SEQ ID NO: 43191 - protein, 9 aa, Artificial Sequence
  Description of Artificial Sequence: Synthetic peptide
DSGILETCD

SEQ ID NO: 43192 - protein, 9 aa, Artificial Sequence
  Description of Artificial Sequence: Synthetic peptide
DSHAYWMYP

SEQ ID NO: 43193 - protein, 9 aa, Artificial Sequence
  Description of Artificial Sequence: Synthetic peptide
DSNFSYLGH

SEQ ID NO: 43194 - protein, 9 aa, Artificial Sequence
  Description of Artificial Sequence: Synthetic peptide
DSQFKMAAW

SEQ ID NO: 43195 - protein, 9 aa, Artificial Sequence
  Description of Artificial Sequence: Synthetic peptide
DTAAQKWEA

SEQ ID NO: 43196 - protein, 9 aa, Artificial Sequence
  Description of Artificial Sequence: Synthetic peptide
DTDTVLQSS

SEQ ID NO: 43197 - protein, 9 aa, Artificial Sequence
  Description of Artificial Sequence: Synthetic peptide
DTEWNHHNT

SEQ ID NO: 43198 - protein, 9 aa, Artificial Sequence
  Description of Artificial Sequence: Synthetic peptide
DTFQPHWYS

SEQ ID NO: 43199 - protein, 9 aa, Artificial Sequence
  Description of Artificial Sequence: Synthetic peptide
DTKHSSYDS

SEQ ID NO: 43200 - protein, 9 aa, Artificial Sequence
  Description of Artificial Sequence: Synthetic peptide
DTMTKEKRH

SEQ ID NO: 43201 - protein, 9 aa, Artificial Sequence
  Description of Artificial Sequence: Synthetic peptide
DTMVDEYDE

SEQ ID NO: 43202 - protein, 9 aa, Artificial Sequence
  Description of Artificial Sequence: Synthetic peptide
DVCSTFGWM

SEQ ID NO: 43203 - protein, 9 aa, Artificial Sequence
  Description of Artificial Sequence: Synthetic peptide
DVDQEQDPI

SEQ ID NO: 43204 - protein, 9 aa, Artificial Sequence
  Description of Artificial Sequence: Synthetic peptide
DVGIHEWCT

SEQ ID NO: 43205 - protein, 9 aa, Artificial Sequence
  Description of Artificial Sequence: Synthetic peptide
DVGLSGFER

SEQ ID NO: 43206 - protein, 9 aa, Artificial Sequence
  Description of Artificial Sequence: Synthetic peptide
DVHLFGEFF

SEQ ID NO: 43207 - protein, 9 aa, Artificial Sequence
  Description of Artificial Sequence: Synthetic peptide
DVLFEGQGS

SEQ ID NO: 43208 - protein, 9 aa, Artificial Sequence
  Description of Artificial Sequence: Synthetic peptide
DVNPASHFC

SEQ ID NO: 43209 - protein, 9 aa, Artificial Sequence
  Description of Artificial Sequence: Synthetic peptide
DVQSWCRQG

SEQ ID NO: 43210 - protein, 9 aa, Artificial Sequence
  Description of Artificial Sequence: Synthetic peptide
DWKPEMDGS

SEQ ID NO: 43211 - protein, 9 aa, Artificial Sequence
  Description of Artificial Sequence: Synthetic peptide
DWRMKKSSY

SEQ ID NO: 43212 - protein, 9 aa, Artificial Sequence
  Description of Artificial Sequence: Synthetic peptide
DWSHTQYGA

SEQ ID NO: 43213 - protein, 9 aa, Artificial Sequence
  Description of Artificial Sequence: Synthetic peptide
DWVCMDWCQ

SEQ ID NO: 43214 - protein, 9 aa, Artificial Sequence
  Description of Artificial Sequence: Synthetic peptide
EADDHDQNR

SEQ ID NO: 43215 - protein, 9 aa, Artificial Sequence
  Description of Artificial Sequence: Synthetic peptide
EAHISAEFK

SEQ ID NO: 43216 - protein, 9 aa, Artificial Sequence
  Description of Artificial Sequence: Synthetic peptide
EAIFHDVEM

SEQ ID NO: 43217 - protein, 9 aa, Artificial Sequence
  Description of Artificial Sequence: Synthetic peptide
EAKTSYRMW

SEQ ID NO: 43218 - protein, 9 aa, Artificial Sequence
  Description of Artificial Sequence: Synthetic peptide
EARETAIMC

SEQ ID NO: 43219 - protein, 9 aa, Artificial Sequence
  Description of Artificial Sequence: Synthetic peptide
EATQHETRV

SEQ ID NO: 43220 - protein, 9 aa, Artificial Sequence
  Description of Artificial Sequence: Synthetic peptide
ECMCVQFCQ

SEQ ID NO: 43221 - protein, 9 aa, Artificial Sequence
  Description of Artificial Sequence: Synthetic peptide
ECTMIEYMG

SEQ ID NO: 43222 - protein, 9 aa, Artificial Sequence
  Description of Artificial Sequence: Synthetic peptide
EDCNTNERS

SEQ ID NO: 43223 - protein, 9 aa, Artificial Sequence
  Description of Artificial Sequence: Synthetic peptide
EDIQFDGDS

SEQ ID NO: 43224 - protein, 9 aa, Artificial Sequence
  Description of Artificial Sequence: Synthetic peptide
EDKTQEMWI

SEQ ID NO: 43225 - protein, 9 aa, Artificial Sequence
  Description of Artificial Sequence: Synthetic peptide
EDLLMNSNT

SEQ ID NO: 43226 - protein, 9 aa, Artificial Sequence
  Description of Artificial Sequence: Synthetic peptide
EEPAMKIFM

SEQ ID NO: 43227 - protein, 9 aa, Artificial Sequence
  Description of Artificial Sequence: Synthetic peptide
EFEHFNYQD

SEQ ID NO: 43228 - protein, 9 aa, Artificial Sequence
  Description of Artificial Sequence: Synthetic peptide
EFRWQQSTP

SEQ ID NO: 43229 - protein, 9 aa, Artificial Sequence
  Description of Artificial Sequence: Synthetic peptide
EFTDQADWE

SEQ ID NO: 43230 - protein, 9 aa, Artificial Sequence
  Description of Artificial Sequence: Synthetic peptide
EFTQDNWGQ

SEQ ID NO: 43231 - protein, 9 aa, Artificial Sequence
  Description of Artificial Sequence: Synthetic peptide
EFYPSTPCS

SEQ ID NO: 43232 - protein, 9 aa, Artificial Sequence
  Description of Artificial Sequence: Synthetic peptide
EGNWWHEYA

SEQ ID NO: 43233 - protein, 9 aa, Artificial Sequence
  Description of Artificial Sequence: Synthetic peptide
EGTDGDMFS

SEQ ID NO: 43234 - protein, 9 aa, Artificial Sequence
  Description of Artificial Sequence: Synthetic peptide
EHESMCCGW

SEQ ID NO: 43235 - protein, 9 aa, Artificial Sequence
  Description of Artificial Sequence: Synthetic peptide
EHKLWEGFA

SEQ ID NO: 43236 - protein, 9 aa, Artificial Sequence
  Description of Artificial Sequence: Synthetic peptide
EHYQKHCYL

SEQ ID NO: 43237 - protein, 9 aa, Artificial Sequence
  Description of Artificial Sequence: Synthetic peptide
EIFQAFLLS

SEQ ID NO: 43238 - protein, 9 aa, Artificial Sequence
  Description of Artificial Sequence: Synthetic peptide
EIQRNHAIQ

SEQ ID NO: 43239 - protein, 9 aa, Artificial Sequence
  Description of Artificial Sequence: Synthetic peptide
EIWMMNGEY

SEQ ID NO: 43240 - protein, 9 aa, Artificial Sequence
  Description of Artificial Sequence: Synthetic peptide
EKAELVRDL

SEQ ID NO: 43241 - protein, 9 aa, Artificial Sequence
  Description of Artificial Sequence: Synthetic peptide
EKCLLMNAR

SEQ ID NO: 43242 - protein, 9 aa, Artificial Sequence
  Description of Artificial Sequence: Synthetic peptide
EKLYSTLQP

SEQ ID NO: 43243 - protein, 9 aa, Artificial Sequence
  Description of Artificial Sequence: Synthetic peptide
ELAEYGNGW

SEQ ID NO: 43244 - protein, 9 aa, Artificial Sequence
  Description of Artificial Sequence: Synthetic peptide
ELEVKSLWW

SEQ ID NO: 43245 - protein, 9 aa, Artificial Sequence
  Description of Artificial Sequence: Synthetic peptide
ELEWMMHCA

SEQ ID NO: 43246 - protein, 9 aa, Artificial Sequence
  Description of Artificial Sequence: Synthetic peptide
EMMYKKLDQ

SEQ ID NO: 43247 - protein, 9 aa, Artificial Sequence
  Description of Artificial Sequence: Synthetic peptide
EMTMEGQDI

SEQ ID NO: 43248 - protein, 9 aa, Artificial Sequence
  Description of Artificial Sequence: Synthetic peptide
EMVQGDTHE

SEQ ID NO: 43249 - protein, 9 aa, Artificial Sequence
  Description of Artificial Sequence: Synthetic peptide
ENDFLCAWT

SEQ ID NO: 43250 - protein, 9 aa, Artificial Sequence
  Description of Artificial Sequence: Synthetic peptide
ENMWGYANH

SEQ ID NO: 43251 - protein, 9 aa, Artificial Sequence
  Description of Artificial Sequence: Synthetic peptide
ENNEYWHVE

SEQ ID NO: 43252 - protein, 9 aa, Artificial Sequence
  Description of Artificial Sequence: Synthetic peptide
EPEMQNQNQ

SEQ ID NO: 43253 - protein, 9 aa, Artificial Sequence
  Description of Artificial Sequence: Synthetic peptide
EPRVHTWRK

SEQ ID NO: 43254 - protein, 9 aa, Artificial Sequence
  Description of Artificial Sequence: Synthetic peptide
ERDYCAYTS

SEQ ID NO: 43255 - protein, 9 aa, Artificial Sequence
  Description of Artificial Sequence: Synthetic peptide
ERKMCFCHP

SEQ ID NO: 43256 - protein, 9 aa, Artificial Sequence
  Description of Artificial Sequence: Synthetic peptide
ESAWKHFVP

SEQ ID NO: 43257 - protein, 9 aa, Artificial Sequence
  Description of Artificial Sequence: Synthetic peptide
ESKWNNPDA

SEQ ID NO: 43258 - protein, 9 aa, Artificial Sequence
  Description of Artificial Sequence: Synthetic peptide
ESMLAIMST

SEQ ID NO: 43259 - protein, 9 aa, Artificial Sequence
  Description of Artificial Sequence: Synthetic peptide
ESNRMMGCG

SEQ ID NO: 43260 - protein, 9 aa, Artificial Sequence
  Description of Artificial Sequence: Synthetic peptide
ESRANATLR

SEQ ID NO: 43261 - protein, 9 aa, Artificial Sequence
  Description of Artificial Sequence: Synthetic peptide
ESVHEGTSS

SEQ ID NO: 43262 - protein, 9 aa, Artificial Sequence
  Description of Artificial Sequence: Synthetic peptide
ESYPNNHDL

SEQ ID NO: 43263 - protein, 9 aa, Artificial Sequence
  Description of Artificial Sequence: Synthetic peptide
ESYYKPDFQ

SEQ ID NO: 43264 - protein, 9 aa, Artificial Sequence
  Description of Artificial Sequence: Synthetic peptide
ETFFLPNCN

SEQ ID NO: 43265 - protein, 9 aa, Artificial Sequence
  Description of Artificial Sequence: Synthetic peptide
ETMCGNELG

SEQ ID NO: 43266 - protein, 9 aa, Artificial Sequence
  Description of Artificial Sequence: Synthetic peptide
ETMDREEDK

SEQ ID NO: 43267 - protein, 9 aa, Artificial Sequence
  Description of Artificial Sequence: Synthetic peptide
ETMFYHIDH

SEQ ID NO: 43268 - protein, 9 aa, Artificial Sequence
  Description of Artificial Sequence: Synthetic peptide
ETQAGAPCN

SEQ ID NO: 43269 - protein, 9 aa, Artificial Sequence
  Description of Artificial Sequence: Synthetic peptide
ETQSAAYDE

SEQ ID NO: 43270 - protein, 9 aa, Artificial Sequence
  Description of Artificial Sequence: Synthetic peptide
ETTWQCIDP

SEQ ID NO: 43271 - protein, 9 aa, Artificial Sequence
  Description of Artificial Sequence: Synthetic peptide
EVAQNTPHQ

SEQ ID NO: 43272 - protein, 9 aa, Artificial Sequence
  Description of Artificial Sequence: Synthetic peptide
EVGDCMPQE

SEQ ID NO: 43273 - protein, 9 aa, Artificial Sequence
  Description of Artificial Sequence: Synthetic peptide
EVGQHEATI

SEQ ID NO: 43274 - protein, 9 aa, Artificial Sequence
  Description of Artificial Sequence: Synthetic peptide
EVSTQTKLS

SEQ ID NO: 43275 - protein, 9 aa, Artificial Sequence
  Description of Artificial Sequence: Synthetic peptide
EVTYWQEWT

SEQ ID NO: 43276 - protein, 9 aa, Artificial Sequence
  Description of Artificial Sequence: Synthetic peptide
EVYQGMLYF

SEQ ID NO: 43277 - protein, 9 aa, Artificial Sequence
  Description of Artificial Sequence: Synthetic peptide
EVYQQQKDH

SEQ ID NO: 43278 - protein, 9 aa, Artificial Sequence
  Description of Artificial Sequence: Synthetic peptide
EWKMWYLQG

SEQ ID NO: 43279 - protein, 9 aa, Artificial Sequence
  Description of Artificial Sequence: Synthetic peptide
EWTDWRDEG

SEQ ID NO: 43280 - protein, 9 aa, Artificial Sequence
  Description of Artificial Sequence: Synthetic peptide
EYEFEGNAP

SEQ ID NO: 43281 - protein, 9 aa, Artificial Sequence
  Description of Artificial Sequence: Synthetic peptide
EYRQAQSFS

SEQ ID NO: 43282 - protein, 9 aa, Artificial Sequence
  Description of Artificial Sequence: Synthetic peptide
FAEQEHMAS

SEQ ID NO: 43283 - protein, 9 aa, Artificial Sequence
  Description of Artificial Sequence: Synthetic peptide
FAIQEYHIT

SEQ ID NO: 43284 - protein, 9 aa, Artificial Sequence
  Description of Artificial Sequence: Synthetic peptide
FATLQAAQD

SEQ ID NO: 43285 - protein, 9 aa, Artificial Sequence
  Description of Artificial Sequence: Synthetic peptide
FATTTYADC

SEQ ID NO: 43286 - protein, 9 aa, Artificial Sequence
  Description of Artificial Sequence: Synthetic peptide
FCHYLVYDD

SEQ ID NO: 43287 - protein, 9 aa, Artificial Sequence
  Description of Artificial Sequence: Synthetic peptide
FFRCEKITA

SEQ ID NO: 43288 - protein, 9 aa, Artificial Sequence
  Description of Artificial Sequence: Synthetic peptide
FISTFERHI

SEQ ID NO: 43289 - protein, 9 aa, Artificial Sequence
  Description of Artificial Sequence: Synthetic peptide
FITEIQDYT

SEQ ID NO: 43290 - protein, 9 aa, Artificial Sequence
  Description of Artificial Sequence: Synthetic peptide
FITRHPVYD

SEQ ID NO: 43291 - protein, 9 aa, Artificial Sequence
  Description of Artificial Sequence: Synthetic peptide
FKYMWNFSN

SEQ ID NO: 43292 - protein, 9 aa, Artificial Sequence
  Description of Artificial Sequence: Synthetic peptide
FLKNKDCLL

SEQ ID NO: 43293 - protein, 9 aa, Artificial Sequence
  Description of Artificial Sequence: Synthetic peptide
FLLQYMQPS

SEQ ID NO: 43294 - protein, 9 aa, Artificial Sequence
  Description of Artificial Sequence: Synthetic peptide
FLVQLSDGV

SEQ ID NO: 43295 - protein, 9 aa, Artificial Sequence
  Description of Artificial Sequence: Synthetic peptide
FMGFCGPYQ

SEQ ID NO: 43296 - protein, 9 aa, Artificial Sequence
  Description of Artificial Sequence: Synthetic peptide
FMNPIGVNG

SEQ ID NO: 43297 - protein, 9 aa, Artificial Sequence
  Description of Artificial Sequence: Synthetic peptide
FMSSRVINF

SEQ ID NO: 43298 - protein, 9 aa, Artificial Sequence
  Description of Artificial Sequence: Synthetic peptide
FPAFPKEAC

SEQ ID NO: 43299 - protein, 9 aa, Artificial Sequence
  Description of Artificial Sequence: Synthetic peptide
FQHDRHTYL

SEQ ID NO: 43300 - protein, 9 aa, Artificial Sequence
  Description of Artificial Sequence: Synthetic peptide
FQIPFCRSF

SEQ ID NO: 43301 - protein, 9 aa, Artificial Sequence
  Description of Artificial Sequence: Synthetic peptide
FQMHHKWDL

SEQ ID NO: 43302 - protein, 9 aa, Artificial Sequence
  Description of Artificial Sequence: Synthetic peptide
FSAMYPHMN

SEQ ID NO: 43303 - protein, 9 aa, Artificial Sequence
  Description of Artificial Sequence: Synthetic peptide
FTALLHYDI

SEQ ID NO: 43304 - protein, 9 aa, Artificial Sequence
  Description of Artificial Sequence: Synthetic peptide
FTAYMQEFA

SEQ ID NO: 43305 - protein, 9 aa, Artificial Sequence
  Description of Artificial Sequence: Synthetic peptide
FTCPVSHFE

SEQ ID NO: 43306 - protein, 9 aa, Artificial Sequence
  Description of Artificial Sequence: Synthetic peptide
FTPWPQCCQ

SEQ ID NO: 43307 - protein, 9 aa, Artificial Sequence
  Description of Artificial Sequence: Synthetic peptide
FTTQFIDGK

SEQ ID NO: 43308 - protein, 9 aa, Artificial Sequence
  Description of Artificial Sequence: Synthetic peptide
FTWTQCVVP

SEQ ID NO: 43309 - protein, 9 aa, Artificial Sequence
  Description of Artificial Sequence: Synthetic peptide
FVEVRMMCH

SEQ ID NO: 43310 - protein, 9 aa, Artificial Sequence
  Description of Artificial Sequence: Synthetic peptide
FVKMRLSDD

SEQ ID NO: 43311 - protein, 9 aa, Artificial Sequence
  Description of Artificial Sequence: Synthetic peptide
FVTVWRTTG

SEQ ID NO: 43312 - protein, 9 aa, Artificial Sequence
  Description of Artificial Sequence: Synthetic peptide
FVWNTMSTE

SEQ ID NO: 43313 - protein, 9 aa, Artificial Sequence
  Description of Artificial Sequence: Synthetic peptide
FYLPMEHMD

SEQ ID NO: 43314 - protein, 9 aa, Artificial Sequence
  Description of Artificial Sequence: Synthetic peptide
FYTETNHAP

SEQ ID NO: 43315 - protein, 9 aa, Artificial Sequence
  Description of Artificial Sequence: Synthetic peptide
GAGLYMVMG

SEQ ID NO: 43316 - protein, 9 aa, Artificial Sequence
  Description of Artificial Sequence: Synthetic peptide
GATCNMFSY

SEQ ID NO: 43317 - protein, 9 aa, Artificial Sequence
  Description of Artificial Sequence: Synthetic peptide
GAVWQQGSD

SEQ ID NO: 43318 - protein, 9 aa, Artificial Sequence
  Description of Artificial Sequence: Synthetic peptide
GDSQLNHWM

SEQ ID NO: 43319 - protein, 9 aa, Artificial Sequence
  Description of Artificial Sequence: Synthetic peptide
GEVEFVPRN

SEQ ID NO: 43320 - protein, 9 aa, Artificial Sequence
  Description of Artificial Sequence: Synthetic peptide
GFTTMYKHG

SEQ ID NO: 43321 - protein, 9 aa, Artificial Sequence
  Description of Artificial Sequence: Synthetic peptide
GHEVQNWPM

SEQ ID NO: 43322 - protein, 9 aa, Artificial Sequence
  Description of Artificial Sequence: Synthetic peptide
GHHQRTTIN

SEQ ID NO: 43323 - protein, 9 aa, Artificial Sequence
  Description of Artificial Sequence: Synthetic peptide
GHKHGIFAG

SEQ ID NO: 43324 - protein, 9 aa, Artificial Sequence
  Description of Artificial Sequence: Synthetic peptide
GHKTPSGPG

SEQ ID NO: 43325 - protein, 9 aa, Artificial Sequence
  Description of Artificial Sequence: Synthetic peptide
GHMCDCTSM

SEQ ID NO: 43326 - protein, 9 aa, Artificial Sequence
  Description of Artificial Sequence: Synthetic peptide
GIDENHAGL

SEQ ID NO: 43327 - protein, 9 aa, Artificial Sequence
  Description of Artificial Sequence: Synthetic peptide
GIGCPQQWE

SEQ ID NO: 43328 - protein, 9 aa, Artificial Sequence
  Description of Artificial Sequence: Synthetic peptide
GIIPWMHFM

SEQ ID NO: 43329 - protein, 9 aa, Artificial Sequence
  Description of Artificial Sequence: Synthetic peptide
GIKANIGTK

SEQ ID NO: 43330 - protein, 9 aa, Artificial Sequence
  Description of Artificial Sequence: Synthetic peptide
GKCENKLST

SEQ ID NO: 43331 - protein, 9 aa, Artificial Sequence
  Description of Artificial Sequence: Synthetic peptide
GKHKTYEPS

SEQ ID NO: 43332 - protein, 9 aa, Artificial Sequence
  Description of Artificial Sequence: Synthetic peptide
GLQAFCFQS

SEQ ID NO: 43333 - protein, 9 aa, Artificial Sequence
  Description of Artificial Sequence: Synthetic peptide
GLQHYGEID

SEQ ID NO: 43334 - protein, 9 aa, Artificial Sequence
  Description of Artificial Sequence: Synthetic peptide
GMCENVSSF

SEQ ID NO: 43335 - protein, 9 aa, Artificial Sequence
  Description of Artificial Sequence: Synthetic peptide
GMPEDSIHW

SEQ ID NO: 43336 - protein, 9 aa, Artificial Sequence
  Description of Artificial Sequence: Synthetic peptide
GMQYIHVTG

SEQ ID NO: 43337 - protein, 9 aa, Artificial Sequence
  Description of Artificial Sequence: Synthetic peptide
GPPMYKDCM

SEQ ID NO: 43338 - protein, 9 aa, Artificial Sequence
  Description of Artificial Sequence: Synthetic peptide
GPYKNITFQ

SEQ ID NO: 43339 - protein, 9 aa, Artificial Sequence
  Description of Artificial Sequence: Synthetic peptide
GQGFRRQHR

SEQ ID NO: 43340 - protein, 9 aa, Artificial Sequence
  Description of Artificial Sequence: Synthetic peptide
GQVEMFADR

SEQ ID NO: 43341 - protein, 9 aa, Artificial Sequence
  Description of Artificial Sequence: Synthetic peptide
GQVSSTWWH

SEQ ID NO: 43342 - protein, 9 aa, Artificial Sequence
  Description of Artificial Sequence: Synthetic peptide
GRNNNTTEQ

SEQ ID NO: 43343 - protein, 9 aa, Artificial Sequence
  Description of Artificial Sequence: Synthetic peptide
GSAPFQCIG

SEQ ID NO: 43344 - protein, 9 aa, Artificial Sequence
  Description of Artificial Sequence: Synthetic peptide
GSHQFSGPH

SEQ ID NO: 43345 - protein, 9 aa, Artificial Sequence
  Description of Artificial Sequence: Synthetic peptide
GSNPPMMQY

SEQ ID NO: 43346 - protein, 9 aa, Artificial Sequence
  Description of Artificial Sequence: Synthetic peptide
GTGTCMWAE

SEQ ID NO: 43347 - protein, 9 aa, Artificial Sequence
  Description of Artificial Sequence: Synthetic peptide
GTQPVNWLI

SEQ ID NO: 43348 - protein, 9 aa, Artificial Sequence
  Description of Artificial Sequence: Synthetic peptide
GTVMRGMAL

SEQ ID NO: 43349 - protein, 9 aa, Artificial Sequence
  Description of Artificial Sequence: Synthetic peptide
GVAPLMDQA

SEQ ID NO: 43350 - protein, 9 aa, Artificial Sequence
  Description of Artificial Sequence: Synthetic peptide
GVEFQHNQA

SEQ ID NO: 43351 - protein, 9 aa, Artificial Sequence
  Description of Artificial Sequence: Synthetic peptide
GVGCEILGA

SEQ ID NO: 43352 - protein, 9 aa, Artificial Sequence
  Description of Artificial Sequence: Synthetic peptide
GVHPDNWRN

SEQ ID NO: 43353 - protein, 9 aa, Artificial Sequence
  Description of Artificial Sequence: Synthetic peptide
GVQLAMSDC

SEQ ID NO: 43354 - protein, 9 aa, Artificial Sequence
  Description of Artificial Sequence: Synthetic peptide
GVQSLHFNS

SEQ ID NO: 43355 - protein, 9 aa, Artificial Sequence
  Description of Artificial Sequence: Synthetic peptide
GVTCKDMYH

SEQ ID NO: 43356 - protein, 9 aa, Artificial Sequence
  Description of Artificial Sequence: Synthetic peptide
GWSQEGHFA

SEQ ID NO: 43357 - protein, 9 aa, Artificial Sequence
  Description of Artificial Sequence: Synthetic peptide
GWWGLVHNQ

SEQ ID NO: 43358 - protein, 9 aa, Artificial Sequence
  Description of Artificial Sequence: Synthetic peptide
GWWYYGQCR

SEQ ID NO: 43359 - protein, 9 aa, Artificial Sequence
  Description of Artificial Sequence: Synthetic peptide
GYASHQHWQ

SEQ ID NO: 43360 - protein, 9 aa, Artificial Sequence
  Description of Artificial Sequence: Synthetic peptide
HAGCSTRTG

SEQ ID NO: 43361 - protein, 9 aa, Artificial Sequence
  Description of Artificial Sequence: Synthetic peptide
HAIHKWPRW

SEQ ID NO: 43362 - protein, 9 aa, Artificial Sequence
  Description of Artificial Sequence: Synthetic peptide
HALGRVANR

SEQ ID NO: 43363 - protein, 9 aa, Artificial Sequence
  Description of Artificial Sequence: Synthetic peptide
HAMLNEICD

SEQ ID NO: 43364 - protein, 9 aa, Artificial Sequence
  Description of Artificial Sequence: Synthetic peptide
HATQRSADA

SEQ ID NO: 43365 - protein, 9 aa, Artificial Sequence
  Description of Artificial Sequence: Synthetic peptide
HAYLAGWCN

SEQ ID NO: 43366 - protein, 9 aa, Artificial Sequence
  Description of Artificial Sequence: Synthetic peptide
HCQDLQIGM

SEQ ID NO: 43367 - protein, 9 aa, Artificial Sequence
  Description of Artificial Sequence: Synthetic peptide
HCWAQYLRF

SEQ ID NO: 43368 - protein, 9 aa, Artificial Sequence
  Description of Artificial Sequence: Synthetic peptide
HGARGEQFA

SEQ ID NO: 43369 - protein, 9 aa, Artificial Sequence
  Description of Artificial Sequence: Synthetic peptide
HGCYVAHCG

SEQ ID NO: 43370 - protein, 9 aa, Artificial Sequence
  Description of Artificial Sequence: Synthetic peptide
HGEMCAFFQ

SEQ ID NO: 43371 - protein, 9 aa, Artificial Sequence
  Description of Artificial Sequence: Synthetic peptide
HGRCIWPMW

SEQ ID NO: 43372 - protein, 9 aa, Artificial Sequence
  Description of Artificial Sequence: Synthetic peptide
HGYADCKAH

SEQ ID NO: 43373 - protein, 9 aa, Artificial Sequence
  Description of Artificial Sequence: Synthetic peptide
HHCNTSEFV

SEQ ID NO: 43374 - protein, 9 aa, Artificial Sequence
  Description of Artificial Sequence: Synthetic peptide
HHEIKVIFE

SEQ ID NO: 43375 - protein, 9 aa, Artificial Sequence
  Description of Artificial Sequence: Synthetic peptide
HHILNVWTE

SEQ ID NO: 43376 - protein, 9 aa, Artificial Sequence
  Description of Artificial Sequence: Synthetic peptide
HHNFRMAMN

SEQ ID NO: 43377 - protein, 9 aa, Artificial Sequence
  Description of Artificial Sequence: Synthetic peptide
HIAIVCLMD

SEQ ID NO: 43378 - protein, 9 aa, Artificial Sequence
  Description of Artificial Sequence: Synthetic peptide
HLLHVCLEK

SEQ ID NO: 43379 - protein, 9 aa, Artificial Sequence
  Description of Artificial Sequence: Synthetic peptide
HMIRGYCDY

SEQ ID NO: 43380 - protein, 9 aa, Artificial Sequence
  Description of Artificial Sequence: Synthetic peptide
HNGMDTQWH

SEQ ID NO: 43381 - protein, 9 aa, Artificial Sequence
  Description of Artificial Sequence: Synthetic peptide
HNHHECRQM

SEQ ID NO: 43382 - protein, 9 aa, Artificial Sequence
  Description of Artificial Sequence: Synthetic peptide
HPPPLPWQS

SEQ ID NO: 43383 - protein, 9 aa, Artificial Sequence
  Description of Artificial Sequence: Synthetic peptide
HQDQPEWAK

SEQ ID NO: 43384 - protein, 9 aa, Artificial Sequence
  Description of Artificial Sequence: Synthetic peptide
HRIAEICRP

SEQ ID NO: 43385 - protein, 9 aa, Artificial Sequence
  Description of Artificial Sequence: Synthetic peptide
HSEMLDLQE

SEQ ID NO: 43386 - protein, 9 aa, Artificial Sequence
  Description of Artificial Sequence: Synthetic peptide
HSQGFDVTQ

SEQ ID NO: 43387 - protein, 9 aa, Artificial Sequence
  Description of Artificial Sequence: Synthetic peptide
HTADMRAYD

SEQ ID NO: 43388 - protein, 9 aa, Artificial Sequence
  Description of Artificial Sequence: Synthetic peptide
HTLFHRDCA

SEQ ID NO: 43389 - protein, 9 aa, Artificial Sequence
  Description of Artificial Sequence: Synthetic peptide
HVATKEECT

SEQ ID NO: 43390 - protein, 9 aa, Artificial Sequence
  Description of Artificial Sequence: Synthetic peptide
HVEPLEETM

SEQ ID NO: 43391 - protein, 9 aa, Artificial Sequence
  Description of Artificial Sequence: Synthetic peptide
HYDPYNRTL

SEQ ID NO: 43392 - protein, 9 aa, Artificial Sequence
  Description of Artificial Sequence: Synthetic peptide
HYYTPDRMT

SEQ ID NO: 43393 - protein, 9 aa, Artificial Sequence
  Description of Artificial Sequence: Synthetic peptide
IACMENLSL

SEQ ID NO: 43394 - protein, 9 aa, Artificial Sequence
  Description of Artificial Sequence: Synthetic peptide
IAFWIDGQC

SEQ ID NO: 43395 - protein, 9 aa, Artificial Sequence
  Description of Artificial Sequence: Synthetic peptide
IAHWCHKCW

SEQ ID NO: 43396 - protein, 9 aa, Artificial Sequence
  Description of Artificial Sequence: Synthetic peptide
IATGRESAI

SEQ ID NO: 43397 - protein, 9 aa, Artificial Sequence
  Description of Artificial Sequence: Synthetic peptide
IATGWESAI

SEQ ID NO: 43398 - protein, 9 aa, Artificial Sequence
  Description of Artificial Sequence: Synthetic peptide
IAWEKCDAW

SEQ ID NO: 43399 - protein, 9 aa, Artificial Sequence
  Description of Artificial Sequence: Synthetic peptide
ICHSGGWST

SEQ ID NO: 43400 - protein, 9 aa, Artificial Sequence
  Description of Artificial Sequence: Synthetic peptide
ICRREWNPV

SEQ ID NO: 43401 - protein, 9 aa, Artificial Sequence
  Description of Artificial Sequence: Synthetic peptide
IDWVGHMGA

SEQ ID NO: 43402 - protein, 9 aa, Artificial Sequence
  Description of Artificial Sequence: Synthetic peptide
IECNYCKFY

SEQ ID NO: 43403 - protein, 9 aa, Artificial Sequence
  Description of Artificial Sequence: Synthetic peptide
IECYKGMFC

SEQ ID NO: 43404 - protein, 9 aa, Artificial Sequence
  Description of Artificial Sequence: Synthetic peptide
IEPEGHLVT

SEQ ID NO: 43405 - protein, 9 aa, Artificial Sequence
  Description of Artificial Sequence: Synthetic peptide
IEYPNKWRW

SEQ ID NO: 43406 - protein, 9 aa, Artificial Sequence
  Description of Artificial Sequence: Synthetic peptide
IFAVMADMS

SEQ ID NO: 43407 - protein, 9 aa, Artificial Sequence
  Description of Artificial Sequence: Synthetic peptide
IFHPQWKQG

SEQ ID NO: 43408 - protein, 9 aa, Artificial Sequence
  Description of Artificial Sequence: Synthetic peptide
IFKHCKHDE

SEQ ID NO: 43409 - protein, 9 aa, Artificial Sequence
  Description of Artificial Sequence: Synthetic peptide
IGAGFYYKP

SEQ ID NO: 43410 - protein, 9 aa, Artificial Sequence
  Description of Artificial Sequence: Synthetic peptide
IGEAFASTG

SEQ ID NO: 43411 - protein, 9 aa, Artificial Sequence
  Description of Artificial Sequence: Synthetic peptide
IGLLTSLHD

SEQ ID NO: 43412 - protein, 9 aa, Artificial Sequence
  Description of Artificial Sequence: Synthetic peptide
IGRVKCART

SEQ ID NO: 43413 - protein, 9 aa, Artificial Sequence
  Description of Artificial Sequence: Synthetic peptide
IGVMPGIVA

SEQ ID NO: 43414 - protein, 9 aa, Artificial Sequence
  Description of Artificial Sequence: Synthetic peptide
IHSAHHWAS

SEQ ID NO: 43415 - protein, 9 aa, Artificial Sequence
  Description of Artificial Sequence: Synthetic peptide
IHSQMIEAP

SEQ ID NO: 43416 - protein, 9 aa, Artificial Sequence
  Description of Artificial Sequence: Synthetic peptide
IIGRFESMS

SEQ ID NO: 43417 - protein, 9 aa, Artificial Sequence
  Description of Artificial Sequence: Synthetic peptide
IINPLRHGD

SEQ ID NO: 43418 - protein, 9 aa, Artificial Sequence
  Description of Artificial Sequence: Synthetic peptide
ILDPQHWSM

SEQ ID NO: 43419 - protein, 9 aa, Artificial Sequence
  Description of Artificial Sequence: Synthetic peptide
ILTHVSDAC

SEQ ID NO: 43420 - protein, 9 aa, Artificial Sequence
  Description of Artificial Sequence: Synthetic peptide
IMGNYIQAN

SEQ ID NO: 43421 - protein, 9 aa, Artificial Sequence
  Description of Artificial Sequence: Synthetic peptide
IMMDWEGNW

SEQ ID NO: 43422 - protein, 9 aa, Artificial Sequence
  Description of Artificial Sequence: Synthetic peptide
IMWVLNELE

SEQ ID NO: 43423 - protein, 9 aa, Artificial Sequence
  Description of Artificial Sequence: Synthetic peptide
INEGIGRHF

SEQ ID NO: 43424 - protein, 9 aa, Artificial Sequence
  Description of Artificial Sequence: Synthetic peptide
INHGTTATF

SEQ ID NO: 43425 - protein, 9 aa, Artificial Sequence
  Description of Artificial Sequence: Synthetic peptide
INMPAVMKF

SEQ ID NO: 43426 - protein, 9 aa, Artificial Sequence
  Description of Artificial Sequence: Synthetic peptide
IPGTRIAWA

SEQ ID NO: 43427 - protein, 9 aa, Artificial Sequence
  Description of Artificial Sequence: Synthetic peptide
IQCYYKGEQ

SEQ ID NO: 43428 - protein, 9 aa, Artificial Sequence
  Description of Artificial Sequence: Synthetic peptide
IRFGSREAK

SEQ ID NO: 43429 - protein, 9 aa, Artificial Sequence
  Description of Artificial Sequence: Synthetic peptide
IRGQANSCV

SEQ ID NO: 43430 - protein, 9 aa, Artificial Sequence
  Description of Artificial Sequence: Synthetic peptide
ISEVENWYD

SEQ ID NO: 43431 - protein, 9 aa, Artificial Sequence
  Description of Artificial Sequence: Synthetic peptide
ISNKLTMPV

SEQ ID NO: 43432 - protein, 9 aa, Artificial Sequence
  Description of Artificial Sequence: Synthetic peptide
ISTMIEYSN

SEQ ID NO: 43433 - protein, 9 aa, Artificial Sequence
  Description of Artificial Sequence: Synthetic peptide
ITEYAQQDC

SEQ ID NO: 43434 - protein, 9 aa, Artificial Sequence
  Description of Artificial Sequence: Synthetic peptide
ITHHRDNWF

SEQ ID NO: 43435 - protein, 9 aa, Artificial Sequence
  Description of Artificial Sequence: Synthetic peptide
ITKIMRQAE

SEQ ID NO: 43436 - protein, 9 aa, Artificial Sequence
  Description of Artificial Sequence: Synthetic peptide
IVMPVAAFH

SEQ ID NO: 43437 - protein, 9 aa, Artificial Sequence
  Description of Artificial Sequence: Synthetic peptide
IVQCFVDSQ

SEQ ID NO: 43438 - protein, 9 aa, Artificial Sequence
  Description of Artificial Sequence: Synthetic peptide
KADPATSIG

SEQ ID NO: 43439 - protein, 9 aa, Artificial Sequence
  Description of Artificial Sequence: Synthetic peptide
KAEAMRNDR

SEQ ID NO: 43440 - protein, 9 aa, Artificial Sequence
  Description of Artificial Sequence: Synthetic peptide
KAECYYGYE

SEQ ID NO: 43441 - protein, 9 aa, Artificial Sequence
  Description of Artificial Sequence: Synthetic peptide
KAEGENVAK

SEQ ID NO: 43442 - protein, 9 aa, Artificial Sequence
  Description of Artificial Sequence: Synthetic peptide
KAFPAPQGP

SEQ ID NO: 43443 - protein, 9 aa, Artificial Sequence
  Description of Artificial Sequence: Synthetic peptide
KAGCMFWCE

SEQ ID NO: 43444 - protein, 9 aa, Artificial Sequence
  Description of Artificial Sequence: Synthetic peptide
KAQHDTAVG

SEQ ID NO: 43445 - protein, 9 aa, Artificial Sequence
  Description of Artificial Sequence: Synthetic peptide
KARVNCHGS

SEQ ID NO: 43446 - protein, 9 aa, Artificial Sequence
  Description of Artificial Sequence: Synthetic peptide
KASDLNTQP

SEQ ID NO: 43447 - protein, 9 aa, Artificial Sequence
  Description of Artificial Sequence: Synthetic peptide
KCCEYCDIA

SEQ ID NO: 43448 - protein, 9 aa, Artificial Sequence
  Description of Artificial Sequence: Synthetic peptide
KCCTCVSFP

SEQ ID NO: 43449 - protein, 9 aa, Artificial Sequence
  Description of Artificial Sequence: Synthetic peptide
KCDFWMGWM

SEQ ID NO: 43450 - protein, 9 aa, Artificial Sequence
  Description of Artificial Sequence: Synthetic peptide
KCICSDDLK

SEQ ID NO: 43451 - protein, 9 aa, Artificial Sequence
  Description of Artificial Sequence: Synthetic peptide
KCLSESFWG

SEQ ID NO: 43452 - protein, 9 aa, Artificial Sequence
  Description of Artificial Sequence: Synthetic peptide
KCLWPFDWG

SEQ ID NO: 43453 - protein, 9 aa, Artificial Sequence
  Description of Artificial Sequence: Synthetic peptide
KCLWPFNWG

SEQ ID NO: 43454 - protein, 9 aa, Artificial Sequence
  Description of Artificial Sequence: Synthetic peptide
KCMDAKEHA

SEQ ID NO: 43455 - protein, 9 aa, Artificial Sequence
  Description of Artificial Sequence: Synthetic peptide
KCQPCIVKC

SEQ ID NO: 43456 - protein, 9 aa, Artificial Sequence
  Description of Artificial Sequence: Synthetic peptide
KCQSKDTHF

SEQ ID NO: 43457 - protein, 9 aa, Artificial Sequence
  Description of Artificial Sequence: Synthetic peptide
KCSTDKAVE

SEQ ID NO: 43458 - protein, 9 aa, Artificial Sequence
  Description of Artificial Sequence: Synthetic peptide
KCVVLENTQ

SEQ ID NO: 43459 - protein, 9 aa, Artificial Sequence
  Description of Artificial Sequence: Synthetic peptide
KDHWECAGY

SEQ ID NO: 43460 - protein, 9 aa, Artificial Sequence
  Description of Artificial Sequence: Synthetic peptide
KDNCVMWHW

SEQ ID NO: 43461 - protein, 9 aa, Artificial Sequence
  Description of Artificial Sequence: Synthetic peptide
KDPKEQFFQ

SEQ ID NO: 43462 - protein, 9 aa, Artificial Sequence
  Description of Artificial Sequence: Synthetic peptide
KDQQDQCND

SEQ ID NO: 43463 - protein, 9 aa, Artificial Sequence
  Description of Artificial Sequence: Synthetic peptide
KEDERKSGT

SEQ ID NO: 43464 - protein, 9 aa, Artificial Sequence
  Description of Artificial Sequence: Synthetic peptide
KETCTNMDL

SEQ ID NO: 43465 - protein, 9 aa, Artificial Sequence
  Description of Artificial Sequence: Synthetic peptide
KFDLCQDSM

SEQ ID NO: 43466 - protein, 9 aa, Artificial Sequence
  Description of Artificial Sequence: Synthetic peptide
KFWMPEMEF

SEQ ID NO: 43467 - protein, 9 aa, Artificial Sequence
  Description of Artificial Sequence: Synthetic peptide
KGDLLDCLE

SEQ ID NO: 43468 - protein, 9 aa, Artificial Sequence
  Description of Artificial Sequence: Synthetic peptide
KGEITPSGD

SEQ ID NO: 43469 - protein, 9 aa, Artificial Sequence
  Description of Artificial Sequence: Synthetic peptide
KGGDGNYPF

SEQ ID NO: 43470 - protein, 9 aa, Artificial Sequence
  Description of Artificial Sequence: Synthetic peptide
KGLDVHALN

SEQ ID NO: 43471 - protein, 9 aa, Artificial Sequence
  Description of Artificial Sequence: Synthetic peptide
KGWKPDMTN

SEQ ID NO: 43472 - protein, 9 aa, Artificial Sequence
  Description of Artificial Sequence: Synthetic peptide
KHAAYNACE

SEQ ID NO: 43473 - protein, 9 aa, Artificial Sequence
  Description of Artificial Sequence: Synthetic peptide
KHQDIMHRG

SEQ ID NO: 43474 - protein, 9 aa, Artificial Sequence
  Description of Artificial Sequence: Synthetic peptide
KIAQVDTWV

SEQ ID NO: 43475 - protein, 9 aa, Artificial Sequence
  Description of Artificial Sequence: Synthetic peptide
KIDSQQSNY

SEQ ID NO: 43476 - protein, 9 aa, Artificial Sequence
  Description of Artificial Sequence: Synthetic peptide
KIDSYGTSM

SEQ ID NO: 43477 - protein, 9 aa, Artificial Sequence
  Description of Artificial Sequence: Synthetic peptide
KIEMQYRQS

SEQ ID NO: 43478 - protein, 9 aa, Artificial Sequence
  Description of Artificial Sequence: Synthetic peptide
KIGYWWPQA

SEQ ID NO: 43479 - protein, 9 aa, Artificial Sequence
  Description of Artificial Sequence: Synthetic peptide
KITPPLGNY

SEQ ID NO: 43480 - protein, 9 aa, Artificial Sequence
  Description of Artificial Sequence: Synthetic peptide
KIYPECHYS

SEQ ID NO: 43481 - protein, 9 aa, Artificial Sequence
  Description of Artificial Sequence: Synthetic peptide
KLEPNMADR

SEQ ID NO: 43482 - protein, 9 aa, Artificial Sequence
  Description of Artificial Sequence: Synthetic peptide
KLLIHGPYE

SEQ ID NO: 43483 - protein, 9 aa, Artificial Sequence
  Description of Artificial Sequence: Synthetic peptide
KMCGNCEAG

SEQ ID NO: 43484 - protein, 9 aa, Artificial Sequence
  Description of Artificial Sequence: Synthetic peptide
KMEHMQHQS

SEQ ID NO: 43485 - protein, 9 aa, Artificial Sequence
  Description of Artificial Sequence: Synthetic peptide
KMESRQLYN

SEQ ID NO: 43486 - protein, 9 aa, Artificial Sequence
  Description of Artificial Sequence: Synthetic peptide
KMQHYDAEA

SEQ ID NO: 43487 - protein, 9 aa, Artificial Sequence
  Description of Artificial Sequence: Synthetic peptide
KNDEYRMQN

SEQ ID NO: 43488 - protein, 9 aa, Artificial Sequence
  Description of Artificial Sequence: Synthetic peptide
KNMLGDWPN

SEQ ID NO: 43489 - protein, 9 aa, Artificial Sequence
  Description of Artificial Sequence: Synthetic peptide
KNMYYMYEA

SEQ ID NO: 43490 - protein, 9 aa, Artificial Sequence
  Description of Artificial Sequence: Synthetic peptide
KPATQLDCA

SEQ ID NO: 43491 - protein, 9 aa, Artificial Sequence
  Description of Artificial Sequence: Synthetic peptide
KPCKHMGGR

SEQ ID NO: 43492 - protein, 9 aa, Artificial Sequence
  Description of Artificial Sequence: Synthetic peptide
KPDHMRWAL

SEQ ID NO: 43493 - protein, 9 aa, Artificial Sequence
  Description of Artificial Sequence: Synthetic peptide
KPDQGGICK

SEQ ID NO: 43494 - protein, 9 aa, Artificial Sequence
  Description of Artificial Sequence: Synthetic peptide
KPEGCLNSR

SEQ ID NO: 43495 - protein, 9 aa, Artificial Sequence
  Description of Artificial Sequence: Synthetic peptide
KPFQALMMS

SEQ ID NO: 43496 - protein, 9 aa, Artificial Sequence
  Description of Artificial Sequence: Synthetic peptide
KPGVHSHHG

SEQ ID NO: 43497 - protein, 9 aa, Artificial Sequence
  Description of Artificial Sequence: Synthetic peptide
KPIAETVNW

SEQ ID NO: 43498 - protein, 9 aa, Artificial Sequence
  Description of Artificial Sequence: Synthetic peptide
KPMGCHASS

SEQ ID NO: 43499 - protein, 9 aa, Artificial Sequence
  Description of Artificial Sequence: Synthetic peptide
KPTPHAYDA

SEQ ID NO: 43500 - protein, 9 aa, Artificial Sequence
  Description of Artificial Sequence: Synthetic peptide
KPWTQIASH

SEQ ID NO: 43501 - protein, 9 aa, Artificial Sequence
  Description of Artificial Sequence: Synthetic peptide
KPWYERYQT

SEQ ID NO: 43502 - protein, 9 aa, Artificial Sequence
  Description of Artificial Sequence: Synthetic peptide
KQATYPHAW

SEQ ID NO: 43503 - protein, 9 aa, Artificial Sequence
  Description of Artificial Sequence: Synthetic peptide
KQDTKNLDE

SEQ ID NO: 43504 - protein, 9 aa, Artificial Sequence
  Description of Artificial Sequence: Synthetic peptide
KQEMFGRFL

SEQ ID NO: 43505 - protein, 9 aa, Artificial Sequence
  Description of Artificial Sequence: Synthetic peptide
KQIPFVSGD

SEQ ID NO: 43506 - protein, 9 aa, Artificial Sequence
  Description of Artificial Sequence: Synthetic peptide
KQQMDHCAM

SEQ ID NO: 43507 - protein, 9 aa, Artificial Sequence
  Description of Artificial Sequence: Synthetic peptide
KQTPYEMFH

SEQ ID NO: 43508 - protein, 9 aa, Artificial Sequence
  Description of Artificial Sequence: Synthetic peptide
KRWVAEWIV

SEQ ID NO: 43509 - protein, 9 aa, Artificial Sequence
  Description of Artificial Sequence: Synthetic peptide
KSDCQFRDH

SEQ ID NO: 43510 - protein, 9 aa, Artificial Sequence
  Description of Artificial Sequence: Synthetic peptide
KSDRWAWGC

SEQ ID NO: 43511 - protein, 9 aa, Artificial Sequence
  Description of Artificial Sequence: Synthetic peptide
KSELSTWGI

SEQ ID NO: 43512 - protein, 9 aa, Artificial Sequence
  Description of Artificial Sequence: Synthetic peptide
KSEPPQVVT

SEQ ID NO: 43513 - protein, 9 aa, Artificial Sequence
  Description of Artificial Sequence: Synthetic peptide
KSGYIDLYH

SEQ ID NO: 43514 - protein, 9 aa, Artificial Sequence
  Description of Artificial Sequence: Synthetic peptide
KSIFLDSWE

SEQ ID NO: 43515 - protein, 9 aa, Artificial Sequence
  Description of Artificial Sequence: Synthetic peptide
KSILKEDDG

SEQ ID NO: 43516 - protein, 9 aa, Artificial Sequence
  Description of Artificial Sequence: Synthetic peptide
KSNGDMSGL

SEQ ID NO: 43517 - protein, 9 aa, Artificial Sequence
  Description of Artificial Sequence: Synthetic peptide
KSNRDMNFA

SEQ ID NO: 43518 - protein, 9 aa, Artificial Sequence
  Description of Artificial Sequence: Synthetic peptide
KSQMEMCIG

SEQ ID NO: 43519 - protein, 9 aa, Artificial Sequence
  Description of Artificial Sequence: Synthetic peptide
KSRDNDGVL

SEQ ID NO: 43520 - protein, 9 aa, Artificial Sequence
  Description of Artificial Sequence: Synthetic peptide
KSTTDSGCQ

SEQ ID NO: 43521 - protein, 9 aa, Artificial Sequence
  Description of Artificial Sequence: Synthetic peptide
KSVQVPDAM

SEQ ID NO: 43522 - protein, 9 aa, Artificial Sequence
  Description of Artificial Sequence: Synthetic peptide
KSWINEWLS

SEQ ID NO: 43523 - protein, 9 aa, Artificial Sequence
  Description of Artificial Sequence: Synthetic peptide
KTDGPGTSW

SEQ ID NO: 43524 - protein, 9 aa, Artificial Sequence
  Description of Artificial Sequence: Synthetic peptide
KTKPLDTVD

SEQ ID NO: 43525 - protein, 9 aa, Artificial Sequence
  Description of Artificial Sequence: Synthetic peptide
KTLSDLAVQ

SEQ ID NO: 43526 - protein, 9 aa, Artificial Sequence
  Description of Artificial Sequence: Synthetic peptide
KTLWALSCN

SEQ ID NO: 43527 - protein, 9 aa, Artificial Sequence
  Description of Artificial Sequence: Synthetic peptide
KTNAEENFI

SEQ ID NO: 43528 - protein, 9 aa, Artificial Sequence
  Description of Artificial Sequence: Synthetic peptide
KTNAWDTPC

SEQ ID NO: 43529 - protein, 9 aa, Artificial Sequence
  Description of Artificial Sequence: Synthetic peptide
KTNPVKYVK

SEQ ID NO: 43530 - protein, 9 aa, Artificial Sequence
  Description of Artificial Sequence: Synthetic peptide
KTQCTAQQN

SEQ ID NO: 43531 - protein, 9 aa, Artificial Sequence
  Description of Artificial Sequence: Synthetic peptide
KTQNEKVWL

SEQ ID NO: 43532 - protein, 9 aa, Artificial Sequence
  Description of Artificial Sequence: Synthetic peptide
KTQTPCFQH

SEQ ID NO: 43533 - protein, 9 aa, Artificial Sequence
  Description of Artificial Sequence: Synthetic peptide
KTSWMMEAV

SEQ ID NO: 43534 - protein, 9 aa, Artificial Sequence
  Description of Artificial Sequence: Synthetic peptide
KTTDGKMID

SEQ ID NO: 43535 - protein, 9 aa, Artificial Sequence
  Description of Artificial Sequence: Synthetic peptide
KTTQWHEWA

SEQ ID NO: 43536 - protein, 9 aa, Artificial Sequence
  Description of Artificial Sequence: Synthetic peptide
KVAQGLGPE

SEQ ID NO: 43537 - protein, 9 aa, Artificial Sequence
  Description of Artificial Sequence: Synthetic peptide
KVCEIGTQG

SEQ ID NO: 43538 - protein, 9 aa, Artificial Sequence
  Description of Artificial Sequence: Synthetic peptide
KVDAFEGRM

SEQ ID NO: 43539 - protein, 9 aa, Artificial Sequence
  Description of Artificial Sequence: Synthetic peptide
KVECAQFDV

SEQ ID NO: 43540 - protein, 9 aa, Artificial Sequence
  Description of Artificial Sequence: Synthetic peptide
KVEPSMLLD

SEQ ID NO: 43541 - protein, 9 aa, Artificial Sequence
  Description of Artificial Sequence: Synthetic peptide
KVGINELFT

SEQ ID NO: 43542 - protein, 9 aa, Artificial Sequence
  Description of Artificial Sequence: Synthetic peptide
KVHLSLWPQ

SEQ ID NO: 43543 - protein, 9 aa, Artificial Sequence
  Description of Artificial Sequence: Synthetic peptide
KVIMYQHNG

SEQ ID NO: 43544 - protein, 9 aa, Artificial Sequence
  Description of Artificial Sequence: Synthetic peptide
KVMWAGSKR

SEQ ID NO: 43545 - protein, 9 aa, Artificial Sequence
  Description of Artificial Sequence: Synthetic peptide
KVNADGSRC

SEQ ID NO: 43546 - protein, 9 aa, Artificial Sequence
  Description of Artificial Sequence: Synthetic peptide
KVPFACCSS

SEQ ID NO: 43547 - protein, 9 aa, Artificial Sequence
  Description of Artificial Sequence: Synthetic peptide
KVRNKDPTM

SEQ ID NO: 43548 - protein, 9 aa, Artificial Sequence
  Description of Artificial Sequence: Synthetic peptide
KVSVQGQVF

SEQ ID NO: 43549 - protein, 9 aa, Artificial Sequence
  Description of Artificial Sequence: Synthetic peptide
KVTHCEAMN

SEQ ID NO: 43550 - protein, 9 aa, Artificial Sequence
  Description of Artificial Sequence: Synthetic peptide
KWELYNNDP

SEQ ID NO: 43551 - protein, 9 aa, Artificial Sequence
  Description of Artificial Sequence: Synthetic peptide
KWHTEDRNC

SEQ ID NO: 43552 - protein, 9 aa, Artificial Sequence
  Description of Artificial Sequence: Synthetic peptide
KYNYKTYKT

SEQ ID NO: 43553 - protein, 9 aa, Artificial Sequence
  Description of Artificial Sequence: Synthetic peptide
KACSAMDFC

SEQ ID NO: 43554 - protein, 9 aa, Artificial Sequence
  Description of Artificial Sequence: Synthetic peptide
KALHQINED

SEQ ID NO: 43555 - protein, 9 aa, Artificial Sequence
  Description of Artificial Sequence: Synthetic peptide
KAPMGWMNE

SEQ ID NO: 43556 - protein, 9 aa, Artificial Sequence
  Description of Artificial Sequence: Synthetic peptide
KAQCALDTM

SEQ ID NO: 43557 - protein, 9 aa, Artificial Sequence
  Description of Artificial Sequence: Synthetic peptide
KCENKDVGY

SEQ ID NO: 43558 - protein, 9 aa, Artificial Sequence
  Description of Artificial Sequence: Synthetic peptide
KCNMNQEAE

SEQ ID NO: 43559 - protein, 9 aa, Artificial Sequence
  Description of Artificial Sequence: Synthetic peptide
KCPQLNDNQ

SEQ ID NO: 43560 - protein, 9 aa, Artificial Sequence
  Description of Artificial Sequence: Synthetic peptide
KCQQEQQYN

SEQ ID NO: 43561 - protein, 9 aa, Artificial Sequence
  Description of Artificial Sequence: Synthetic peptide
KEGVENTGW

SEQ ID NO: 43562 - protein, 9 aa, Artificial Sequence
  Description of Artificial Sequence: Synthetic peptide
KEMWNCDPA

SEQ ID NO: 43563 - protein, 9 aa, Artificial Sequence
  Description of Artificial Sequence: Synthetic peptide
KETPFLMQS

SEQ ID NO: 43564 - protein, 9 aa, Artificial Sequence
  Description of Artificial Sequence: Synthetic peptide
KFHVKPVDM

SEQ ID NO: 43565 - protein, 9 aa, Artificial Sequence
  Description of Artificial Sequence: Synthetic peptide
KHMQSDHFT

SEQ ID NO: 43566 - protein, 9 aa, Artificial Sequence
  Description of Artificial Sequence: Synthetic peptide
KHVYSEMGL

SEQ ID NO: 43567 - protein, 9 aa, Artificial Sequence
  Description of Artificial Sequence: Synthetic peptide
KIHKNEDLF

SEQ ID NO: 43568 - protein, 9 aa, Artificial Sequence
  Description of Artificial Sequence: Synthetic peptide
KKLDGHDKY

SEQ ID NO: 43569 - protein, 9 aa, Artificial Sequence
  Description of Artificial Sequence: Synthetic peptide
KKVMGMGIY

SEQ ID NO: 43570 - protein, 9 aa, Artificial Sequence
  Description of Artificial Sequence: Synthetic peptide
KLVQRCEVD

SEQ ID NO: 43571 - protein, 9 aa, Artificial Sequence
  Description of Artificial Sequence: Synthetic peptide
KMLDWKNCS

SEQ ID NO: 43572 - protein, 9 aa, Artificial Sequence
  Description of Artificial Sequence: Synthetic peptide
KNGVDDAHN

SEQ ID NO: 43573 - protein, 9 aa, Artificial Sequence
  Description of Artificial Sequence: Synthetic peptide
KNVVHEKQA

SEQ ID NO: 43574 - protein, 9 aa, Artificial Sequence
  Description of Artificial Sequence: Synthetic peptide
KQALMENFF

SEQ ID NO: 43575 - protein, 9 aa, Artificial Sequence
  Description of Artificial Sequence: Synthetic peptide
KQTTAEIGY

SEQ ID NO: 43576 - protein, 9 aa, Artificial Sequence
  Description of Artificial Sequence: Synthetic peptide
KRDDCHNDN

SEQ ID NO: 43577 - protein, 9 aa, Artificial Sequence
  Description of Artificial Sequence: Synthetic peptide
KRTVIHEMM

SEQ ID NO: 43578 - protein, 9 aa, Artificial Sequence
  Description of Artificial Sequence: Synthetic peptide
KSHYGAGVT

SEQ ID NO: 43579 - protein, 9 aa, Artificial Sequence
  Description of Artificial Sequence: Synthetic peptide
KSIDNYLCE

SEQ ID NO: 43580 - protein, 9 aa, Artificial Sequence
  Description of Artificial Sequence: Synthetic peptide
KSKRWNWDV

SEQ ID NO: 43581 - protein, 9 aa, Artificial Sequence
  Description of Artificial Sequence: Synthetic peptide
KSVCCQINN

SEQ ID NO: 43582 - protein, 9 aa, Artificial Sequence
  Description of Artificial Sequence: Synthetic peptide
KTFCTQYMD

SEQ ID NO: 43583 - protein, 9 aa, Artificial Sequence
  Description of Artificial Sequence: Synthetic peptide
KTFLVKTFI

SEQ ID NO: 43584 - protein, 9 aa, Artificial Sequence
  Description of Artificial Sequence: Synthetic peptide
KTRNCPKEA

SEQ ID NO: 43585 - protein, 9 aa, Artificial Sequence
  Description of Artificial Sequence: Synthetic peptide
KTSLVVRRG

SEQ ID NO: 43586 - protein, 9 aa, Artificial Sequence
  Description of Artificial Sequence: Synthetic peptide
KTTLCVQWG

SEQ ID NO: 43587 - protein, 9 aa, Artificial Sequence
  Description of Artificial Sequence: Synthetic peptide
KTVQQVQMG

SEQ ID NO: 43588 - protein, 9 aa, Artificial Sequence
  Description of Artificial Sequence: Synthetic peptide
KTWWTEQSA

SEQ ID NO: 43589 - protein, 9 aa, Artificial Sequence
  Description of Artificial Sequence: Synthetic peptide
KVAADLGHL

SEQ ID NO: 43590 - protein, 9 aa, Artificial Sequence
  Description of Artificial Sequence: Synthetic peptide
KVEHYYDIG

SEQ ID NO: 43591 - protein, 9 aa, Artificial Sequence
  Description of Artificial Sequence: Synthetic peptide
KVISHCDHY

SEQ ID NO: 43592 - protein, 9 aa, Artificial Sequence
  Description of Artificial Sequence: Synthetic peptide
KWRVSVYVM

SEQ ID NO: 43593 - protein, 9 aa, Artificial Sequence
  Description of Artificial Sequence: Synthetic peptide
KYEEFECMY

SEQ ID NO: 43594 - protein, 9 aa, Artificial Sequence
  Description of Artificial Sequence: Synthetic peptide
KYICTRWHC

SEQ ID NO: 43595 - protein, 9 aa, Artificial Sequence
  Description of Artificial Sequence: Synthetic peptide
KYSPTPFMY

SEQ ID NO: 43596 - protein, 9 aa, Artificial Sequence
  Description of Artificial Sequence: Synthetic peptide
KYTPWDATF

SEQ ID NO: 43597 - protein, 9 aa, Artificial Sequence
  Description of Artificial Sequence: Synthetic peptide
IACRCNCFD

SEQ ID NO: 43598 - protein, 9 aa, Artificial Sequence
  Description of Artificial Sequence: Synthetic peptide
IADSKRLQK

SEQ ID NO: 43599 - protein, 9 aa, Artificial Sequence
  Description of Artificial Sequence: Synthetic peptide
IADVQRCHY

SEQ ID NO: 43600 - protein, 9 aa, Artificial Sequence
  Description of Artificial Sequence: Synthetic peptide
IAGHYDSWK

SEQ ID NO: 43601 - protein, 9 aa, Artificial Sequence
  Description of Artificial Sequence: Synthetic peptide
IAGMKVITP

SEQ ID NO: 43602 - protein, 9 aa, Artificial Sequence
  Description of Artificial Sequence: Synthetic peptide
IAHSVFTDH

SEQ ID NO: 43603 - protein, 9 aa, Artificial Sequence
  Description of Artificial Sequence: Synthetic peptide
IAQRTRQQQ

SEQ ID NO: 43604 - protein, 9 aa, Artificial Sequence
  Description of Artificial Sequence: Synthetic peptide
IAQTTLLPG

SEQ ID NO: 43605 - protein, 9 aa, Artificial Sequence
  Description of Artificial Sequence: Synthetic peptide
IATIKVHAS

SEQ ID NO: 43606 - protein, 9 aa, Artificial Sequence
  Description of Artificial Sequence: Synthetic peptide
LAAPKTMCH

SEQ ID NO: 43607 - protein, 9 aa, Artificial Sequence
  Description of Artificial Sequence: Synthetic peptide
LACFSYTNV

SEQ ID NO: 43608 - protein, 9 aa, Artificial Sequence
  Description of Artificial Sequence: Synthetic peptide
LAEPKKWHT

SEQ ID NO: 43609 - protein, 9 aa, Artificial Sequence
  Description of Artificial Sequence: Synthetic peptide
LAFQYCYPP

SEQ ID NO: 43610 - protein, 9 aa, Artificial Sequence
  Description of Artificial Sequence: Synthetic peptide
LAGLKHAYK

SEQ ID NO: 43611 - protein, 9 aa, Artificial Sequence
  Description of Artificial Sequence: Synthetic peptide
LAHWQGLTY

SEQ ID NO: 43612 - protein, 9 aa, Artificial Sequence
  Description of Artificial Sequence: Synthetic peptide
LALCIRHSW

SEQ ID NO: 43613 - protein, 9 aa, Artificial Sequence
  Description of Artificial Sequence: Synthetic peptide
LAPPHKLDL

SEQ ID NO: 43614 - protein, 9 aa, Artificial Sequence
  Description of Artificial Sequence: Synthetic peptide
LASFTSPDP

SEQ ID NO: 43615 - protein, 9 aa, Artificial Sequence
  Description of Artificial Sequence: Synthetic peptide
LASTYWYSQ

SEQ ID NO: 43616 - protein, 9 aa, Artificial Sequence
  Description of Artificial Sequence: Synthetic peptide
LATLNAFQN

SEQ ID NO: 43617 - protein, 9 aa, Artificial Sequence
  Description of Artificial Sequence: Synthetic peptide
LAVVRATLD

SEQ ID NO: 43618 - protein, 9 aa, Artificial Sequence
  Description of Artificial Sequence: Synthetic peptide
MAASDWHVM

SEQ ID NO: 43619 - protein, 9 aa, Artificial Sequence
  Description of Artificial Sequence: Synthetic peptide
MAAWLEWGL

SEQ ID NO: 43620 - protein, 9 aa, Artificial Sequence
  Description of Artificial Sequence: Synthetic peptide
MAEIRTRHV

SEQ ID NO: 43621 - protein, 9 aa, Artificial Sequence
  Description of Artificial Sequence: Synthetic peptide
MAHENTKAG

SEQ ID NO: 43622 - protein, 9 aa, Artificial Sequence
  Description of Artificial Sequence: Synthetic peptide
MAMTLEISD

SEQ ID NO: 43623 - protein, 9 aa, Artificial Sequence
  Description of Artificial Sequence: Synthetic peptide
MASTYIERE

SEQ ID NO: 43624 - protein, 9 aa, Artificial Sequence
  Description of Artificial Sequence: Synthetic peptide
MAVPMKMHC

SEQ ID NO: 43625 - protein, 9 aa, Artificial Sequence
  Description of Artificial Sequence: Synthetic peptide
MAYLVVRQH

SEQ ID NO: 43626 - protein, 9 aa, Artificial Sequence
  Description of Artificial Sequence: Synthetic peptide
NAARMEQAT

SEQ ID NO: 43627 - protein, 9 aa, Artificial Sequence
  Description of Artificial Sequence: Synthetic peptide
NACTTKVGS

SEQ ID NO: 43628 - protein, 9 aa, Artificial Sequence
  Description of Artificial Sequence: Synthetic peptide
NADYCSFPI

SEQ ID NO: 43629 - protein, 9 aa, Artificial Sequence
  Description of Artificial Sequence: Synthetic peptide
NAENHTKTC

SEQ ID NO: 43630 - protein, 9 aa, Artificial Sequence
  Description of Artificial Sequence: Synthetic peptide
NAFSMDIHV

SEQ ID NO: 43631 - protein, 9 aa, Artificial Sequence
  Description of Artificial Sequence: Synthetic peptide
NAQSDPHQG

SEQ ID NO: 43632 - protein, 9 aa, Artificial Sequence
  Description of Artificial Sequence: Synthetic peptide
NASKYGDFL

SEQ ID NO: 43633 - protein, 9 aa, Artificial Sequence
  Description of Artificial Sequence: Synthetic peptide
NASSTVINT

SEQ ID NO: 43634 - protein, 9 aa, Artificial Sequence
  Description of Artificial Sequence: Synthetic peptide
NATANYCLG

SEQ ID NO: 43635 - protein, 9 aa, Artificial Sequence
  Description of Artificial Sequence: Synthetic peptide
NATTHSHTS

SEQ ID NO: 43636 - protein, 9 aa, Artificial Sequence
  Description of Artificial Sequence: Synthetic peptide
NAVDRGIAT

SEQ ID NO: 43637 - protein, 9 aa, Artificial Sequence
  Description of Artificial Sequence: Synthetic peptide
NAVPIKYPY

SEQ ID NO: 43638 - protein, 9 aa, Artificial Sequence
  Description of Artificial Sequence: Synthetic peptide
NAWSSNEEA

SEQ ID NO: 43639 - protein, 9 aa, Artificial Sequence
  Description of Artificial Sequence: Synthetic peptide
PAQRVIANL

SEQ ID NO: 43640 - protein, 9 aa, Artificial Sequence
  Description of Artificial Sequence: Synthetic peptide
QAALMTEQF

SEQ ID NO: 43641 - protein, 9 aa, Artificial Sequence
  Description of Artificial Sequence: Synthetic peptide
QADRMLKTG

SEQ ID NO: 43642 - protein, 9 aa, Artificial Sequence
  Description of Artificial Sequence: Synthetic peptide
QADRWTGII

SEQ ID NO: 43643 - protein, 9 aa, Artificial Sequence
  Description of Artificial Sequence: Synthetic peptide
QAEWPGTMT

SEQ ID NO: 43644 - protein, 9 aa, Artificial Sequence
  Description of Artificial Sequence: Synthetic peptide
QAGLGSDAP

SEQ ID NO: 43645 - protein, 9 aa, Artificial Sequence
  Description of Artificial Sequence: Synthetic peptide
QAHCVNLSS

SEQ ID NO: 43646 - protein, 9 aa, Artificial Sequence
  Description of Artificial Sequence: Synthetic peptide
QAMNSARTH

SEQ ID NO: 43647 - protein, 9 aa, Artificial Sequence
  Description of Artificial Sequence: Synthetic peptide
QAMTMLMQH

SEQ ID NO: 43648 - protein, 9 aa, Artificial Sequence
  Description of Artificial Sequence: Synthetic peptide
QANNYNRMD

SEQ ID NO: 43649 - protein, 9 aa, Artificial Sequence
  Description of Artificial Sequence: Synthetic peptide
QANTGRVYS

SEQ ID NO: 43650 - protein, 9 aa, Artificial Sequence
  Description of Artificial Sequence: Synthetic peptide
QAQCAMGAR

SEQ ID NO: 43651 - protein, 9 aa, Artificial Sequence
  Description of Artificial Sequence: Synthetic peptide
QAQWMGCKW

SEQ ID NO: 43652 - protein, 9 aa, Artificial Sequence
  Description of Artificial Sequence: Synthetic peptide
QARIENNQF

SEQ ID NO: 43653 - protein, 9 aa, Artificial Sequence
  Description of Artificial Sequence: Synthetic peptide
QATLQPVCI

SEQ ID NO: 43654 - protein, 9 aa, Artificial Sequence
  Description of Artificial Sequence: Synthetic peptide
QATQTYDWH

SEQ ID NO: 43655 - protein, 9 aa, Artificial Sequence
  Description of Artificial Sequence: Synthetic peptide
QATYPITSE

SEQ ID NO: 43656 - protein, 9 aa, Artificial Sequence
  Description of Artificial Sequence: Synthetic peptide
RADLWHIQN

SEQ ID NO: 43657 - protein, 9 aa, Artificial Sequence
  Description of Artificial Sequence: Synthetic peptide
RAEDKWRSC

SEQ ID NO: 43658 - protein, 9 aa, Artificial Sequence
  Description of Artificial Sequence: Synthetic peptide
RAERNSAEQ

SEQ ID NO: 43659 - protein, 9 aa, Artificial Sequence
  Description of Artificial Sequence: Synthetic peptide
RAMAMDSSH

SEQ ID NO: 43660 - protein, 9 aa, Artificial Sequence
  Description of Artificial Sequence: Synthetic peptide
RAMDDQHYG

SEQ ID NO: 43661 - protein, 9 aa, Artificial Sequence
  Description of Artificial Sequence: Synthetic peptide
RAMLVEQWG

SEQ ID NO: 43662 - protein, 9 aa, Artificial Sequence
  Description of Artificial Sequence: Synthetic peptide
RAQLFHQKT

SEQ ID NO: 43663 - protein, 9 aa, Artificial Sequence
  Description of Artificial Sequence: Synthetic peptide
RAQPTSCCG

SEQ ID NO: 43664 - protein, 9 aa, Artificial Sequence
  Description of Artificial Sequence: Synthetic peptide
RASVMPEAV

SEQ ID NO: 43665 - protein, 9 aa, Artificial Sequence
  Description of Artificial Sequence: Synthetic peptide
SAAFQARLG

SEQ ID NO: 43666 - protein, 9 aa, Artificial Sequence
  Description of Artificial Sequence: Synthetic peptide
SAAFSAFNV

SEQ ID NO: 43667 - protein, 9 aa, Artificial Sequence
  Description of Artificial Sequence: Synthetic peptide
SAAWQLQMT

SEQ ID NO: 43668 - protein, 9 aa, Artificial Sequence
  Description of Artificial Sequence: Synthetic peptide
SACQKEWCP

SEQ ID NO: 43669 - protein, 9 aa, Artificial Sequence
  Description of Artificial Sequence: Synthetic peptide
SAEHKTHTM

SEQ ID NO: 43670 - protein, 9 aa, Artificial Sequence
  Description of Artificial Sequence: Synthetic peptide
SAGRRNIGM

SEQ ID NO: 43671 - protein, 9 aa, Artificial Sequence
  Description of Artificial Sequence: Synthetic peptide
SAHAGMHSN

SEQ ID NO: 43672 - protein, 9 aa, Artificial Sequence
  Description of Artificial Sequence: Synthetic peptide
SAHKEDISG

SEQ ID NO: 43673 - protein, 9 aa, Artificial Sequence
  Description of Artificial Sequence: Synthetic peptide
SAKSHLSNV

SEQ ID NO: 43674 - protein, 9 aa, Artificial Sequence
  Description of Artificial Sequence: Synthetic peptide
SAKYFSFGV

SEQ ID NO: 43675 - protein, 9 aa, Artificial Sequence
  Description of Artificial Sequence: Synthetic peptide
SANMFVFGK

SEQ ID NO: 43676 - protein, 9 aa, Artificial Sequence
  Description of Artificial Sequence: Synthetic peptide
SANYYMTNM

SEQ ID NO: 43677 - protein, 9 aa, Artificial Sequence
  Description of Artificial Sequence: Synthetic peptide
SARVCDCPW

SEQ ID NO: 43678 - protein, 9 aa, Artificial Sequence
  Description of Artificial Sequence: Synthetic peptide
SASDPKNCY

SEQ ID NO: 43679 - protein, 9 aa, Artificial Sequence
  Description of Artificial Sequence: Synthetic peptide
SASKFGWFS

SEQ ID NO: 43680 - protein, 9 aa, Artificial Sequence
  Description of Artificial Sequence: Synthetic peptide
SASWLDDQS

SEQ ID NO: 43681 - protein, 9 aa, Artificial Sequence
  Description of Artificial Sequence: Synthetic peptide
SATGMRDYA

SEQ ID NO: 43682 - protein, 9 aa, Artificial Sequence
  Description of Artificial Sequence: Synthetic peptide
SAWFTIVSG

SEQ ID NO: 43683 - protein, 9 aa, Artificial Sequence
  Description of Artificial Sequence: Synthetic peptide
TAAGYHFCK

SEQ ID NO: 43684 - protein, 9 aa, Artificial Sequence
  Description of Artificial Sequence: Synthetic peptide
TAAPWRHQS

SEQ ID NO: 43685 - protein, 9 aa, Artificial Sequence
  Description of Artificial Sequence: Synthetic peptide
TAAQFMDEL

SEQ ID NO: 43686 - protein, 9 aa, Artificial Sequence
  Description of Artificial Sequence: Synthetic peptide
TACLCLERP

SEQ ID NO: 43687 - protein, 9 aa, Artificial Sequence
  Description of Artificial Sequence: Synthetic peptide
TADPLCRGA

SEQ ID NO: 43688 - protein, 9 aa, Artificial Sequence
  Description of Artificial Sequence: Synthetic peptide
TAGILDHYL

SEQ ID NO: 43689 - protein, 9 aa, Artificial Sequence
  Description of Artificial Sequence: Synthetic peptide
TAHCVMNKQ

SEQ ID NO: 43690 - protein, 9 aa, Artificial Sequence
  Description of Artificial Sequence: Synthetic peptide
TAHGIYTQF

SEQ ID NO: 43691 - protein, 9 aa, Artificial Sequence
  Description of Artificial Sequence: Synthetic peptide
TAHPGWEGY

SEQ ID NO: 43692 - protein, 9 aa, Artificial Sequence
  Description of Artificial Sequence: Synthetic peptide
TAKFFADWP

SEQ ID NO: 43693 - protein, 9 aa, Artificial Sequence
  Description of Artificial Sequence: Synthetic peptide
TALIISQNL

SEQ ID NO: 43694 - protein, 9 aa, Artificial Sequence
  Description of Artificial Sequence: Synthetic peptide
TALLLDANP

SEQ ID NO: 43695 - protein, 9 aa, Artificial Sequence
  Description of Artificial Sequence: Synthetic peptide
TAMPITAIP

SEQ ID NO: 43696 - protein, 9 aa, Artificial Sequence
  Description of Artificial Sequence: Synthetic peptide
TAMQSGKVS

SEQ ID NO: 43697 - protein, 9 aa, Artificial Sequence
  Description of Artificial Sequence: Synthetic peptide
TANPEALVD

SEQ ID NO: 43698 - protein, 9 aa, Artificial Sequence
  Description of Artificial Sequence: Synthetic peptide
TANYGAAFA

SEQ ID NO: 43699 - protein, 9 aa, Artificial Sequence
  Description of Artificial Sequence: Synthetic peptide
TAQKSFMNC

SEQ ID NO: 43700 - protein, 9 aa, Artificial Sequence
  Description of Artificial Sequence: Synthetic peptide
TATQCKAKE

SEQ ID NO: 43701 - protein, 9 aa, Artificial Sequence
  Description of Artificial Sequence: Synthetic peptide
TAVTTWNMP

SEQ ID NO: 43702 - protein, 9 aa, Artificial Sequence
  Description of Artificial Sequence: Synthetic peptide
VADSWAYNP

SEQ ID NO: 43703 - protein, 9 aa, Artificial Sequence
  Description of Artificial Sequence: Synthetic peptide
VAEWIMEKC

SEQ ID NO: 43704 - protein, 9 aa, Artificial Sequence
  Description of Artificial Sequence: Synthetic peptide
VAKQSADPI

SEQ ID NO: 43705 - protein, 9 aa, Artificial Sequence
  Description of Artificial Sequence: Synthetic peptide
VALNVAQKG

SEQ ID NO: 43706 - protein, 9 aa, Artificial Sequence
  Description of Artificial Sequence: Synthetic peptide
VAMKKMTDD

SEQ ID NO: 43707 - protein, 9 aa, Artificial Sequence
  Description of Artificial Sequence: Synthetic peptide
VAMPTMKYK

SEQ ID NO: 43708 - protein, 9 aa, Artificial Sequence
  Description of Artificial Sequence: Synthetic peptide
VAQLALDEK

SEQ ID NO: 43709 - protein, 9 aa, Artificial Sequence
  Description of Artificial Sequence: Synthetic peptide
VARFTELCP

SEQ ID NO: 43710 - protein, 9 aa, Artificial Sequence
  Description of Artificial Sequence: Synthetic peptide
VARTFGEEK

SEQ ID NO: 43711 - protein, 9 aa, Artificial Sequence
  Description of Artificial Sequence: Synthetic peptide
VASKFAGSV

SEQ ID NO: 43712 - protein, 9 aa, Artificial Sequence
  Description of Artificial Sequence: Synthetic peptide
VATAQWLSC

SEQ ID NO: 43713 - protein, 9 aa, Artificial Sequence
  Description of Artificial Sequence: Synthetic peptide
VAVQFREWL

SEQ ID NO: 43714 - protein, 9 aa, Artificial Sequence
  Description of Artificial Sequence: Synthetic peptide
WAEHRDMRN

SEQ ID NO: 43715 - protein, 9 aa, Artificial Sequence
  Description of Artificial Sequence: Synthetic peptide
WALTGYNIT

SEQ ID NO: 43716 - protein, 9 aa, Artificial Sequence
  Description of Artificial Sequence: Synthetic peptide
WAQVCHCGE

SEQ ID NO: 43717 - protein, 9 aa, Artificial Sequence
  Description of Artificial Sequence: Synthetic peptide
YAAGAMEAS

SEQ ID NO: 43718 - protein, 9 aa, Artificial Sequence
  Description of Artificial Sequence: Synthetic peptide
YADMPSERG

SEQ ID NO: 43719 - protein, 9 aa, Artificial Sequence
  Description of Artificial Sequence: Synthetic peptide
YAELLQKMF

SEQ ID NO: 43720 - protein, 9 aa, Artificial Sequence
  Description of Artificial Sequence: Synthetic peptide
YAGCMLAIQ

SEQ ID NO: 43721 - protein, 9 aa, Artificial Sequence
  Description of Artificial Sequence: Synthetic peptide
YAGSHEENC

SEQ ID NO: 43722 - protein, 9 aa, Artificial Sequence
  Description of Artificial Sequence: Synthetic peptide
YAHAIMGCQ

SEQ ID NO: 43723 - protein, 9 aa, Artificial Sequence
  Description of Artificial Sequence: Synthetic peptide
YAHENQQTS

SEQ ID NO: 43724 - protein, 9 aa, Artificial Sequence
  Description of Artificial Sequence: Synthetic peptide
YANMKMICE

SEQ ID NO: 43725 - protein, 9 aa, Artificial Sequence
  Description of Artificial Sequence: Synthetic peptide
YAQTYYNKD

SEQ ID NO: 43726 - protein, 9 aa, Artificial Sequence
  Description of Artificial Sequence: Synthetic peptide
YARRFWTCV

SEQ ID NO: 43727 - protein, 9 aa, Artificial Sequence
  Description of Artificial Sequence: Synthetic peptide
YARTTLANK

SEQ ID NO: 43728 - protein, 9 aa, Artificial Sequence
  Description of Artificial Sequence: Synthetic peptide
YASILTNQS

SEQ ID NO: 43729 - protein, 9 aa, Artificial Sequence
  Description of Artificial Sequence: Synthetic peptide
YASQSWQQE

SEQ ID NO: 43730 - protein, 9 aa, Artificial Sequence
  Description of Artificial Sequence: Synthetic peptide
YATELGEYG

SEQ ID NO: 43731 - protein, 9 aa, Artificial Sequence
  Description of Artificial Sequence: Synthetic peptide
YAVFGHQSR

SEQ ID NO: 43732 - protein, 9 aa, Artificial Sequence
  Description of Artificial Sequence: Synthetic peptide
YAVLQNHYG

SEQ ID NO: 43733 - protein, 9 aa, Artificial Sequence
  Description of Artificial Sequence: Synthetic peptide
AALIGLIGD

SEQ ID NO: 43734 - protein, 9 aa, Artificial Sequence
  Description of Artificial Sequence: Synthetic peptide
AANPTQWMT

SEQ ID NO: 43735 - protein, 9 aa, Artificial Sequence
  Description of Artificial Sequence: Synthetic peptide
AATMQTVPT

SEQ ID NO: 43736 - protein, 9 aa, Artificial Sequence
  Description of Artificial Sequence: Synthetic peptide
AAYMAKLRA

SEQ ID NO: 43737 - protein, 9 aa, Artificial Sequence
  Description of Artificial Sequence: Synthetic peptide
CAEQIMRNQ

SEQ ID NO: 43738 - protein, 9 aa, Artificial Sequence
  Description of Artificial Sequence: Synthetic peptide
CAQRSMRSM

SEQ ID NO: 43739 - protein, 9 aa, Artificial Sequence
  Description of Artificial Sequence: Synthetic peptide
CAQSFTVKG

SEQ ID NO: 43740 - protein, 9 aa, Artificial Sequence
  Description of Artificial Sequence: Synthetic peptide
CASHRKGAV

SEQ ID NO: 43741 - protein, 9 aa, Artificial Sequence
  Description of Artificial Sequence: Synthetic peptide
DAENFVFKG

SEQ ID NO: 43742 - protein, 9 aa, Artificial Sequence
  Description of Artificial Sequence: Synthetic peptide
DANMTRTRP

SEQ ID NO: 43743 - protein, 9 aa, Artificial Sequence
  Description of Artificial Sequence: Synthetic peptide
DANVIAHNP

SEQ ID NO: 43744 - protein, 9 aa, Artificial Sequence
  Description of Artificial Sequence: Synthetic peptide
EASFVVEPV

SEQ ID NO: 43745 - protein, 9 aa, Artificial Sequence
  Description of Artificial Sequence: Synthetic peptide
FAIWEAHGR

SEQ ID NO: 43746 - protein, 9 aa, Artificial Sequence
  Description of Artificial Sequence: Synthetic peptide
FASHNYAPV

SEQ ID NO: 43747 - protein, 9 aa, Artificial Sequence
  Description of Artificial Sequence: Synthetic peptide
FASRVCVDG

SEQ ID NO: 43748 - protein, 9 aa, Artificial Sequence
  Description of Artificial Sequence: Synthetic peptide
GAEQNNECT

SEQ ID NO: 43749 - protein, 9 aa, Artificial Sequence
  Description of Artificial Sequence: Synthetic peptide
GAFTVEFSP

SEQ ID NO: 43750 - protein, 9 aa, Artificial Sequence
  Description of Artificial Sequence: Synthetic peptide
HAMQEELPP

SEQ ID NO: 43751 - protein, 9 aa, Artificial Sequence
  Description of Artificial Sequence: Synthetic peptide
HAQFRGSAT

SEQ ID NO: 43752 - protein, 9 aa, Artificial Sequence
  Description of Artificial Sequence: Synthetic peptide
IACTQQISV

SEQ ID NO: 43753 - protein, 9 aa, Artificial Sequence
  Description of Artificial Sequence: Synthetic peptide
IADWFDYEC

SEQ ID NO: 43754 - protein, 9 aa, Artificial Sequence
  Description of Artificial Sequence: Synthetic peptide
IAMQYPEQY

SEQ ID NO: 43755 - protein, 9 aa, Artificial Sequence
  Description of Artificial Sequence: Synthetic peptide
IAPSVNQAT

SEQ ID NO: 43756 - protein, 9 aa, Artificial Sequence
  Description of Artificial Sequence: Synthetic peptide
IAPWWSTTT

SEQ ID NO: 43757 - protein, 9 aa, Artificial Sequence
  Description of Artificial Sequence: Synthetic peptide
LAEAGQNQV

SEQ ID NO: 43758 - protein, 9 aa, Artificial Sequence
  Description of Artificial Sequence: Synthetic peptide
LAEGLKRTG

SEQ ID NO: 43759 - protein, 9 aa, Artificial Sequence
  Description of Artificial Sequence: Synthetic peptide
LAGKSGQQV

SEQ ID NO: 43760 - protein, 9 aa, Artificial Sequence
  Description of Artificial Sequence: Synthetic peptide
LAIEMVDRS

SEQ ID NO: 43761 - protein, 9 aa, Artificial Sequence
  Description of Artificial Sequence: Synthetic peptide
LAISFKGKW

SEQ ID NO: 43762 - protein, 9 aa, Artificial Sequence
  Description of Artificial Sequence: Synthetic peptide
LARGKDVAE

SEQ ID NO: 43763 - protein, 9 aa, Artificial Sequence
  Description of Artificial Sequence: Synthetic peptide
MAKIGYYMI

SEQ ID NO: 43764 - protein, 9 aa, Artificial Sequence
  Description of Artificial Sequence: Synthetic peptide
MAKPNPPLG

SEQ ID NO: 43765 - protein, 9 aa, Artificial Sequence
  Description of Artificial Sequence: Synthetic peptide
NAAKYFWKQ

SEQ ID NO: 43766 - protein, 9 aa, Artificial Sequence
  Description of Artificial Sequence: Synthetic peptide
NADLQIFFR

SEQ ID NO: 43767 - protein, 9 aa, Artificial Sequence
  Description of Artificial Sequence: Synthetic peptide
NALPESMTC

SEQ ID NO: 43768 - protein, 9 aa, Artificial Sequence
  Description of Artificial Sequence: Synthetic peptide
NAYPFVDHR

SEQ ID NO: 43769 - protein, 9 aa, Artificial Sequence
  Description of Artificial Sequence: Synthetic peptide
PAAMDYLMD

SEQ ID NO: 43770 - protein, 9 aa, Artificial Sequence
  Description of Artificial Sequence: Synthetic peptide
PACQETGMF

SEQ ID NO: 43771 - protein, 9 aa, Artificial Sequence
  Description of Artificial Sequence: Synthetic peptide
PAEAEKIGR

SEQ ID NO: 43772 - protein, 9 aa, Artificial Sequence
  Description of Artificial Sequence: Synthetic peptide
QAEFRCGNH

SEQ ID NO: 43773 - protein, 9 aa, Artificial Sequence
  Description of Artificial Sequence: Synthetic peptide
QAFCEPNTP

SEQ ID NO: 43774 - protein, 9 aa, Artificial Sequence
  Description of Artificial Sequence: Synthetic peptide
QAGKWAVCE

SEQ ID NO: 43775 - protein, 9 aa, Artificial Sequence
  Description of Artificial Sequence: Synthetic peptide
QALWYEDMT

SEQ ID NO: 43776 - protein, 9 aa, Artificial Sequence
  Description of Artificial Sequence: Synthetic peptide
QASCTHVWD

SEQ ID NO: 43777 - protein, 9 aa, Artificial Sequence
  Description of Artificial Sequence: Synthetic peptide
RAEWKQWSC

SEQ ID NO: 43778 - protein, 9 aa, Artificial Sequence
  Description of Artificial Sequence: Synthetic peptide
SAEWMQSWH

SEQ ID NO: 43779 - protein, 9 aa, Artificial Sequence
  Description of Artificial Sequence: Synthetic peptide
SAEWTHNNQ

SEQ ID NO: 43780 - protein, 9 aa, Artificial Sequence
  Description of Artificial Sequence: Synthetic peptide
SAGMYARVA

SEQ ID NO: 43781 - protein, 9 aa, Artificial Sequence
  Description of Artificial Sequence: Synthetic peptide
SATMCDSQS

SEQ ID NO: 43782 - protein, 9 aa, Artificial Sequence
  Description of Artificial Sequence: Synthetic peptide
SAYWFQMAG

SEQ ID NO: 43783 - protein, 9 aa, Artificial Sequence
  Description of Artificial Sequence: Synthetic peptide
TAEHIKVDL

SEQ ID NO: 43784 - protein, 9 aa, Artificial Sequence
  Description of Artificial Sequence: Synthetic peptide
TAISEIPAP

SEQ ID NO: 43785 - protein, 9 aa, Artificial Sequence
  Description of Artificial Sequence: Synthetic peptide
TAKMVAAME

SEQ ID NO: 43786 - protein, 9 aa, Artificial Sequence
  Description of Artificial Sequence: Synthetic peptide
TALMLNMAS

SEQ ID NO: 43787 - protein, 9 aa, Artificial Sequence
  Description of Artificial Sequence: Synthetic peptide
TAVTTNKWA

SEQ ID NO: 43788 - protein, 9 aa, Artificial Sequence
  Description of Artificial Sequence: Synthetic peptide
VAAKNYKER

SEQ ID NO: 43789 - protein, 9 aa, Artificial Sequence
  Description of Artificial Sequence: Synthetic peptide
VAMMVAGFQ

SEQ ID NO: 43790 - protein, 9 aa, Artificial Sequence
  Description of Artificial Sequence: Synthetic peptide
VAMTDAKMC

SEQ ID NO: 43791 - protein, 9 aa, Artificial Sequence
  Description of Artificial Sequence: Synthetic peptide
VANVAIADM

SEQ ID NO: 43792 - protein, 9 aa, Artificial Sequence
  Description of Artificial Sequence: Synthetic peptide
VASGSTEVC

SEQ ID NO: 43793 - protein, 9 aa, Artificial Sequence
  Description of Artificial Sequence: Synthetic peptide
VATMIATQL

SEQ ID NO: 43794 - protein, 9 aa, Artificial Sequence
  Description of Artificial Sequence: Synthetic peptide
WAHKDWSNW

SEQ ID NO: 43795 - protein, 9 aa, Artificial Sequence
  Description of Artificial Sequence: Synthetic peptide
WAMEDGKSA

SEQ ID NO: 43796 - protein, 9 aa, Artificial Sequence
  Description of Artificial Sequence: Synthetic peptide
YAALTYYYS

SEQ ID NO: 43797 - protein, 9 aa, Artificial Sequence
  Description of Artificial Sequence: Synthetic peptide
ICKQNYSRT

SEQ ID NO: 43798 - protein, 9 aa, Artificial Sequence
  Description of Artificial Sequence: Synthetic peptide
IFKEGIHYQ

SEQ ID NO: 43799 - protein, 9 aa, Artificial Sequence
  Description of Artificial Sequence: Synthetic peptide
IPKNMGGCE

SEQ ID NO: 43800 - protein, 9 aa, Artificial Sequence
  Description of Artificial Sequence: Synthetic peptide
IRKEVAVVP

SEQ ID NO: 43801 - protein, 9 aa, Artificial Sequence
  Description of Artificial Sequence: Synthetic peptide
IRKNYRMKQ

SEQ ID NO: 43802 - protein, 9 aa, Artificial Sequence
  Description of Artificial Sequence: Synthetic peptide
ITKNRDRWP

SEQ ID NO: 43803 - protein, 9 aa, Artificial Sequence
  Description of Artificial Sequence: Synthetic peptide
IVKLVLPVG

SEQ ID NO: 43804 - protein, 9 aa, Artificial Sequence
  Description of Artificial Sequence: Synthetic peptide
IVKQEHESY

SEQ ID NO: 43805 - protein, 9 aa, Artificial Sequence
  Description of Artificial Sequence: Synthetic peptide
IYKPNTQLQ

SEQ ID NO: 43806 - protein, 9 aa, Artificial Sequence
  Description of Artificial Sequence: Synthetic peptide
IYKTRHGWW

SEQ ID NO: 43807 - protein, 9 aa, Artificial Sequence
  Description of Artificial Sequence: Synthetic peptide
IYKVLKPVH

SEQ ID NO: 43808 - protein, 9 aa, Artificial Sequence
  Description of Artificial Sequence: Synthetic peptide
LCKQLGKQE

SEQ ID NO: 43809 - protein, 9 aa, Artificial Sequence
  Description of Artificial Sequence: Synthetic peptide
LGKQEAVTN

SEQ ID NO: 43810 - protein, 9 aa, Artificial Sequence
  Description of Artificial Sequence: Synthetic peptide
LGKWKIQGT

SEQ ID NO: 43811 - protein, 9 aa, Artificial Sequence
  Description of Artificial Sequence: Synthetic peptide
LIKPLEISD

SEQ ID NO: 43812 - protein, 9 aa, Artificial Sequence
  Description of Artificial Sequence: Synthetic peptide
LMKCLNWCC

SEQ ID NO: 43813 - protein, 9 aa, Artificial Sequence
  Description of Artificial Sequence: Synthetic peptide
LMKCNEAFT

SEQ ID NO: 43814 - protein, 9 aa, Artificial Sequence
  Description of Artificial Sequence: Synthetic peptide
LQKSWNMLQ

SEQ ID NO: 43815 - protein, 9 aa, Artificial Sequence
  Description of Artificial Sequence: Synthetic peptide
LVKRKELET

SEQ ID NO: 43816 - protein, 9 aa, Artificial Sequence
  Description of Artificial Sequence: Synthetic peptide
LVKWTNVLP

SEQ ID NO: 43817 - protein, 9 aa, Artificial Sequence
  Description of Artificial Sequence: Synthetic peptide
LYKMMYAFR

SEQ ID NO: 43818 - protein, 9 aa, Artificial Sequence
  Description of Artificial Sequence: Synthetic peptide
MCKLKLEIP

SEQ ID NO: 43819 - protein, 9 aa, Artificial Sequence
  Description of Artificial Sequence: Synthetic peptide
MCKNQNKPA

SEQ ID NO: 43820 - protein, 9 aa, Artificial Sequence
  Description of Artificial Sequence: Synthetic peptide
MHKPEGMNG

SEQ ID NO: 43821 - protein, 9 aa, Artificial Sequence
  Description of Artificial Sequence: Synthetic peptide
MIKPSVEGM

SEQ ID NO: 43822 - protein, 9 aa, Artificial Sequence
  Description of Artificial Sequence: Synthetic peptide
MLKCTHDLP

SEQ ID NO: 43823 - protein, 9 aa, Artificial Sequence
  Description of Artificial Sequence: Synthetic peptide
MNKTMINYA

SEQ ID NO: 43824 - protein, 9 aa, Artificial Sequence
  Description of Artificial Sequence: Synthetic peptide
MQKLMALQA

SEQ ID NO: 43825 - protein, 9 aa, Artificial Sequence
  Description of Artificial Sequence: Synthetic peptide
MQKTIQQWM

SEQ ID NO: 43826 - protein, 9 aa, Artificial Sequence
  Description of Artificial Sequence: Synthetic peptide
MWKVYEKSE

SEQ ID NO: 43827 - protein, 9 aa, Artificial Sequence
  Description of Artificial Sequence: Synthetic peptide
NHKWICLTR

SEQ ID NO: 43828 - protein, 9 aa, Artificial Sequence
  Description of Artificial Sequence: Synthetic peptide
NIKSRMIEF

SEQ ID NO: 43829 - protein, 9 aa, Artificial Sequence
  Description of Artificial Sequence: Synthetic peptide
NMKSQWQPS

SEQ ID NO: 43830 - protein, 9 aa, Artificial Sequence
  Description of Artificial Sequence: Synthetic peptide
NNKFWDYDP

SEQ ID NO: 43831 - protein, 9 aa, Artificial Sequence
  Description of Artificial Sequence: Synthetic peptide
NQKATTASY

SEQ ID NO: 43832 - protein, 9 aa, Artificial Sequence
  Description of Artificial Sequence: Synthetic peptide
NQKWSTWNN

SEQ ID NO: 43833 - protein, 9 aa, Artificial Sequence
  Description of Artificial Sequence: Synthetic peptide
NVKCMQHMV

SEQ ID NO: 43834 - protein, 9 aa, Artificial Sequence
  Description of Artificial Sequence: Synthetic peptide
PRKNQVDLG

SEQ ID NO: 43835 - protein, 9 aa, Artificial Sequence
  Description of Artificial Sequence: Synthetic peptide
QCKQPLVIN

SEQ ID NO: 43836 - protein, 9 aa, Artificial Sequence
  Description of Artificial Sequence: Synthetic peptide
QDKTKSCMY

SEQ ID NO: 43837 - protein, 9 aa, Artificial Sequence
  Description of Artificial Sequence: Synthetic peptide
QGKYSANWY

SEQ ID NO: 43838 - protein, 9 aa, Artificial Sequence
  Description of Artificial Sequence: Synthetic peptide
QKKFIQCYG

SEQ ID NO: 43839 - protein, 9 aa, Artificial Sequence
  Description of Artificial Sequence: Synthetic peptide
QLKAPPAAH

SEQ ID NO: 43840 - protein, 9 aa, Artificial Sequence
  Description of Artificial Sequence: Synthetic peptide
QMKMLWFNV

SEQ ID NO: 43841 - protein, 9 aa, Artificial Sequence
  Description of Artificial Sequence: Synthetic peptide
QNKPASMHP

SEQ ID NO: 43842 - protein, 9 aa, Artificial Sequence
  Description of Artificial Sequence: Synthetic peptide
QQKPQECYS

SEQ ID NO: 43843 - protein, 9 aa, Artificial Sequence
  Description of Artificial Sequence: Synthetic peptide
QVKDVVGNV

SEQ ID NO: 43844 - protein, 9 aa, Artificial Sequence
  Description of Artificial Sequence: Synthetic peptide
RGKTYEHGN

SEQ ID NO: 43845 - protein, 9 aa, Artificial Sequence
  Description of Artificial Sequence: Synthetic peptide
RPKTFAALR

SEQ ID NO: 43846 - protein, 9 aa, Artificial Sequence
  Description of Artificial Sequence: Synthetic peptide
RSKQARISH

SEQ ID NO: 43847 - protein, 9 aa, Artificial Sequence
  Description of Artificial Sequence: Synthetic peptide
SCKLNLHEG

SEQ ID NO: 43848 - protein, 9 aa, Artificial Sequence
  Description of Artificial Sequence: Synthetic peptide
SFKFYAEEA

SEQ ID NO: 43849 - protein, 9 aa, Artificial Sequence
  Description of Artificial Sequence: Synthetic peptide
SGKQGNWRL

SEQ ID NO: 43850 - protein, 9 aa, Artificial Sequence
  Description of Artificial Sequence: Synthetic peptide
SIKELVGCG

SEQ ID NO: 43851 - protein, 9 aa, Artificial Sequence
  Description of Artificial Sequence: Synthetic peptide
SIKMIDCFG

SEQ ID NO: 43852 - protein, 9 aa, Artificial Sequence
  Description of Artificial Sequence: Synthetic peptide
SMKWFITDD

SEQ ID NO: 43853 - protein, 9 aa, Artificial Sequence
  Description of Artificial Sequence: Synthetic peptide
SVKYCQSKD

SEQ ID NO: 43854 - protein, 9 aa, Artificial Sequence
  Description of Artificial Sequence: Synthetic peptide
TFKSYEMET

SEQ ID NO: 43855 - protein, 9 aa, Artificial Sequence
  Description of Artificial Sequence: Synthetic peptide
TFKYHYNAC

SEQ ID NO: 43856 - protein, 9 aa, Artificial Sequence
  Description of Artificial Sequence: Synthetic peptide
THKWGWWIA

SEQ ID NO: 43857 - protein, 9 aa, Artificial Sequence
  Description of Artificial Sequence: Synthetic peptide
TIKPKNEWC

SEQ ID NO: 43858 - protein, 9 aa, Artificial Sequence
  Description of Artificial Sequence: Synthetic peptide
TIKPYYPYQ

SEQ ID NO: 43859 - protein, 9 aa, Artificial Sequence
  Description of Artificial Sequence: Synthetic peptide
TKKKRNGHL

SEQ ID NO: 43860 - protein, 9 aa, Artificial Sequence
  Description of Artificial Sequence: Synthetic peptide
TRKDTLVAS

SEQ ID NO: 43861 - protein, 9 aa, Artificial Sequence
  Description of Artificial Sequence: Synthetic peptide
TSKTCFAEK

SEQ ID NO: 43862 - protein, 9 aa, Artificial Sequence
  Description of Artificial Sequence: Synthetic peptide
TTKEDFVCS

SEQ ID NO: 43863 - protein, 9 aa, Artificial Sequence
  Description of Artificial Sequence: Synthetic peptide
TTKYTQSIF

SEQ ID NO: 43864 - protein, 9 aa, Artificial Sequence
  Description of Artificial Sequence: Synthetic peptide
TVKPAVPGE

SEQ ID NO: 43865 - protein, 9 aa, Artificial Sequence
  Description of Artificial Sequence: Synthetic peptide
VEKSSIMNR

SEQ ID NO: 43866 - protein, 9 aa, Artificial Sequence
  Description of Artificial Sequence: Synthetic peptide
VFKLPEPVV

SEQ ID NO: 43867 - protein, 9 aa, Artificial Sequence
  Description of Artificial Sequence: Synthetic peptide
VSKCGVSHI

SEQ ID NO: 43868 - protein, 9 aa, Artificial Sequence
  Description of Artificial Sequence: Synthetic peptide
VTKYKYEGM

SEQ ID NO: 43869 - protein, 9 aa, Artificial Sequence
  Description of Artificial Sequence: Synthetic peptide
WKKMKYTWK

SEQ ID NO: 43870 - protein, 9 aa, Artificial Sequence
  Description of Artificial Sequence: Synthetic peptide
WMKPEFHYD

SEQ ID NO: 43871 - protein, 9 aa, Artificial Sequence
  Description of Artificial Sequence: Synthetic peptide
YSKYKRLWI

SEQ ID NO: 43872 - protein, 9 aa, Artificial Sequence
  Description of Artificial Sequence: Synthetic peptide
AEKPWNAMN

SEQ ID NO: 43873 - protein, 9 aa, Artificial Sequence
  Description of Artificial Sequence: Synthetic peptide
AIKFKYAPD

SEQ ID NO: 43874 - protein, 9 aa, Artificial Sequence
  Description of Artificial Sequence: Synthetic peptide
ANKVGTAGN

SEQ ID NO: 43875 - protein, 9 aa, Artificial Sequence
  Description of Artificial Sequence: Synthetic peptide
AQKEYSKYL

SEQ ID NO: 43876 - protein, 9 aa, Artificial Sequence
  Description of Artificial Sequence: Synthetic peptide
CKKMGLHVM

SEQ ID NO: 43877 - protein, 9 aa, Artificial Sequence
  Description of Artificial Sequence: Synthetic peptide
CSKFRECCG

SEQ ID NO: 43878 - protein, 9 aa, Artificial Sequence
  Description of Artificial Sequence: Synthetic peptide
DFKTMNYMV

SEQ ID NO: 43879 - protein, 9 aa, Artificial Sequence
  Description of Artificial Sequence: Synthetic peptide
DFKWIQDQG

SEQ ID NO: 43880 - protein, 9 aa, Artificial Sequence
  Description of Artificial Sequence: Synthetic peptide
DHKILGAIP

SEQ ID NO: 43881 - protein, 9 aa, Artificial Sequence
  Description of Artificial Sequence: Synthetic peptide
ELKVAISSG

SEQ ID NO: 43882 - protein, 9 aa, Artificial Sequence
  Description of Artificial Sequence: Synthetic peptide
ENKTQFAYL

SEQ ID NO: 43883 - protein, 9 aa, Artificial Sequence
  Description of Artificial Sequence: Synthetic peptide
FRKMGCGKT

SEQ ID NO: 43884 - protein, 9 aa, Artificial Sequence
  Description of Artificial Sequence: Synthetic peptide
GLKLNLFQA

SEQ ID NO: 43885 - protein, 9 aa, Artificial Sequence
  Description of Artificial Sequence: Synthetic peptide
GSKTCQQVM

SEQ ID NO: 43886 - protein, 9 aa, Artificial Sequence
  Description of Artificial Sequence: Synthetic peptide
LNKGQPLFM

SEQ ID NO: 43887 - protein, 9 aa, Artificial Sequence
  Description of Artificial Sequence: Synthetic peptide
LTKETGQVV

SEQ ID NO: 43888 - protein, 9 aa, Artificial Sequence
  Description of Artificial Sequence: Synthetic peptide
MLKTARWRD

SEQ ID NO: 43889 - protein, 9 aa, Artificial Sequence
  Description of Artificial Sequence: Synthetic peptide
MSKPRVCCA

SEQ ID NO: 43890 - protein, 9 aa, Artificial Sequence
  Description of Artificial Sequence: Synthetic peptide
MVKTGVEEM

SEQ ID NO: 43891 - protein, 9 aa, Artificial Sequence
  Description of Artificial Sequence: Synthetic peptide
MWKFAQLRL

SEQ ID NO: 43892 - protein, 9 aa, Artificial Sequence
  Description of Artificial Sequence: Synthetic peptide
MYKPEQWCM

SEQ ID NO: 43893 - protein, 9 aa, Artificial Sequence
  Description of Artificial Sequence: Synthetic peptide
QIKSCKNTD

SEQ ID NO: 43894 - protein, 9 aa, Artificial Sequence
  Description of Artificial Sequence: Synthetic peptide
STKQHPHLN

SEQ ID NO: 43895 - protein, 9 aa, Artificial Sequence
  Description of Artificial Sequence: Synthetic peptide
STKVPWWFP

SEQ ID NO: 43896 - protein, 9 aa, Artificial Sequence
  Description of Artificial Sequence: Synthetic peptide
TMKFSHESA

SEQ ID NO: 43897 - protein, 9 aa, Artificial Sequence
  Description of Artificial Sequence: Synthetic peptide
TYKYKESSE

SEQ ID NO: 43898 - protein, 9 aa, Artificial Sequence
  Description of Artificial Sequence: Synthetic peptide
VQKSWEYDN

SEQ ID NO: 43899 - protein, 9 aa, Artificial Sequence
  Description of Artificial Sequence: Synthetic peptide
WSKKDIWAD

SEQ ID NO: 43900 - protein, 9 aa, Artificial Sequence
  Description of Artificial Sequence: Synthetic peptide
IIPKDNKWR

SEQ ID NO: 43901 - protein, 9 aa, Artificial Sequence
  Description of Artificial Sequence: Synthetic peptide
IPAKFRSWW

SEQ ID NO: 43902 - protein, 9 aa, Artificial Sequence
  Description of Artificial Sequence: Synthetic peptide
ISVKGLTTH

SEQ ID NO: 43903 - protein, 9 aa, Artificial Sequence
  Description of Artificial Sequence: Synthetic peptide
IYCKIKEWG

SEQ ID NO: 43904 - protein, 9 aa, Artificial Sequence
  Description of Artificial Sequence: Synthetic peptide
LDHKCAAGM

SEQ ID NO: 43905 - protein, 9 aa, Artificial Sequence
  Description of Artificial Sequence: Synthetic peptide
LHLKLINHC

SEQ ID NO: 43906 - protein, 9 aa, Artificial Sequence
  Description of Artificial Sequence: Synthetic peptide
LLEKKQASG

SEQ ID NO: 43907 - protein, 9 aa, Artificial Sequence
  Description of Artificial Sequence: Synthetic peptide
LSQKPSNLI

SEQ ID NO: 43908 - protein, 9 aa, Artificial Sequence
  Description of Artificial Sequence: Synthetic peptide
LYAKKMAGY

SEQ ID NO: 43909 - protein, 9 aa, Artificial Sequence
  Description of Artificial Sequence: Synthetic peptide
LYAKKMVGY

SEQ ID NO: 43910 - protein, 9 aa, Artificial Sequence
  Description of Artificial Sequence: Synthetic peptide
MGSKIHFMA

SEQ ID NO: 43911 - protein, 9 aa, Artificial Sequence
  Description of Artificial Sequence: Synthetic peptide
MQGKNMAVT

SEQ ID NO: 43912 - protein, 9 aa, Artificial Sequence
  Description of Artificial Sequence: Synthetic peptide
NCVKAMDWY

SEQ ID NO: 43913 - protein, 9 aa, Artificial Sequence
  Description of Artificial Sequence: Synthetic peptide
NHEKTIASF

SEQ ID NO: 43914 - protein, 9 aa, Artificial Sequence
  Description of Artificial Sequence: Synthetic peptide
NIDKRGPMM

SEQ ID NO: 43915 - protein, 9 aa, Artificial Sequence
  Description of Artificial Sequence: Synthetic peptide
NMLKHMFGQ

SEQ ID NO: 43916 - protein, 9 aa, Artificial Sequence
  Description of Artificial Sequence: Synthetic peptide
NMVKYIHMG

SEQ ID NO: 43917 - protein, 9 aa, Artificial Sequence
  Description of Artificial Sequence: Synthetic peptide
NRAKEHWHQ

SEQ ID NO: 43918 - protein, 9 aa, Artificial Sequence
  Description of Artificial Sequence: Synthetic peptide
NSYKLDWGW

SEQ ID NO: 43919 - protein, 9 aa, Artificial Sequence
  Description of Artificial Sequence: Synthetic peptide
NTGKMEEKR

SEQ ID NO: 43920 - protein, 9 aa, Artificial Sequence
  Description of Artificial Sequence: Synthetic peptide
PFEKWNSQS

SEQ ID NO: 43921 - protein, 9 aa, Artificial Sequence
  Description of Artificial Sequence: Synthetic peptide
PFRKSAGYM

SEQ ID NO: 43922 - protein, 9 aa, Artificial Sequence
  Description of Artificial Sequence: Synthetic peptide
QHTKPNCRD

SEQ ID NO: 43923 - protein, 9 aa, Artificial Sequence
  Description of Artificial Sequence: Synthetic peptide
QLCKVGRDN

SEQ ID NO: 43924 - protein, 9 aa, Artificial Sequence
  Description of Artificial Sequence: Synthetic peptide
QTEKLMRLD

SEQ ID NO: 43925 - protein, 9 aa, Artificial Sequence
  Description of Artificial Sequence: Synthetic peptide
QTNKWDVVT

SEQ ID NO: 43926 - protein, 9 aa, Artificial Sequence
  Description of Artificial Sequence: Synthetic peptide
QTWKLITHG

SEQ ID NO: 43927 - protein, 9 aa, Artificial Sequence
  Description of Artificial Sequence: Synthetic peptide
QVHKGQKFS

SEQ ID NO: 43928 - protein, 9 aa, Artificial Sequence
  Description of Artificial Sequence: Synthetic peptide
QVNKITWVN

SEQ ID NO: 43929 - protein, 9 aa, Artificial Sequence
  Description of Artificial Sequence: Synthetic peptide
QVTKFVTEG

SEQ ID NO: 43930 - protein, 9 aa, Artificial Sequence
  Description of Artificial Sequence: Synthetic peptide
QWCKLINMC

SEQ ID NO: 43931 - protein, 9 aa, Artificial Sequence
  Description of Artificial Sequence: Synthetic peptide
QWVKYHDIW

SEQ ID NO: 43932 - protein, 9 aa, Artificial Sequence
  Description of Artificial Sequence: Synthetic peptide
QYTKKYWNH

SEQ ID NO: 43933 - protein, 9 aa, Artificial Sequence
  Description of Artificial Sequence: Synthetic peptide
RVHKGQKFS

SEQ ID NO: 43934 - protein, 9 aa, Artificial Sequence
  Description of Artificial Sequence: Synthetic peptide
SCAKFDVVE

SEQ ID NO: 43935 - protein, 9 aa, Artificial Sequence
  Description of Artificial Sequence: Synthetic peptide
SDSKLHQVA

SEQ ID NO: 43936 - protein, 9 aa, Artificial Sequence
  Description of Artificial Sequence: Synthetic peptide
SGTKYCCWW

SEQ ID NO: 43937 - protein, 9 aa, Artificial Sequence
  Description of Artificial Sequence: Synthetic peptide
SIGKWPAYE

SEQ ID NO: 43938 - protein, 9 aa, Artificial Sequence
  Description of Artificial Sequence: Synthetic peptide
SMMKCPTQY

SEQ ID NO: 43939 - protein, 9 aa, Artificial Sequence
  Description of Artificial Sequence: Synthetic peptide
SVWKCERIS

SEQ ID NO: 43940 - protein, 9 aa, Artificial Sequence
  Description of Artificial Sequence: Synthetic peptide
TCTKAVDHC

SEQ ID NO: 43941 - protein, 9 aa, Artificial Sequence
  Description of Artificial Sequence: Synthetic peptide
TYEKFNKHQ

SEQ ID NO: 43942 - protein, 9 aa, Artificial Sequence
  Description of Artificial Sequence: Synthetic peptide
TYIKSYQMA

SEQ ID NO: 43943 - protein, 9 aa, Artificial Sequence
  Description of Artificial Sequence: Synthetic peptide
VRDKGVQCA

SEQ ID NO: 43944 - protein, 9 aa, Artificial Sequence
  Description of Artificial Sequence: Synthetic peptide
VSQKSPTAW

SEQ ID NO: 43945 - protein, 9 aa, Artificial Sequence
  Description of Artificial Sequence: Synthetic peptide
WCTKCNYNQ

SEQ ID NO: 43946 - protein, 9 aa, Artificial Sequence
  Description of Artificial Sequence: Synthetic peptide
WCVKRMENH

SEQ ID NO: 43947 - protein, 9 aa, Artificial Sequence
  Description of Artificial Sequence: Synthetic peptide
WVEKHLMLG

SEQ ID NO: 43948 - protein, 9 aa, Artificial Sequence
  Description of Artificial Sequence: Synthetic peptide
YSQKPEEAN

SEQ ID NO: 43949 - protein, 9 aa, Artificial Sequence
  Description of Artificial Sequence: Synthetic peptide
CTYKTGSPA

SEQ ID NO: 43950 - protein, 9 aa, Artificial Sequence
  Description of Artificial Sequence: Synthetic peptide
CVLKWATMW

SEQ ID NO: 43951 - protein, 9 aa, Artificial Sequence
  Description of Artificial Sequence: Synthetic peptide
DQMKWSQMG

SEQ ID NO: 43952 - protein, 9 aa, Artificial Sequence
  Description of Artificial Sequence: Synthetic peptide
DWVKATQMC

SEQ ID NO: 43953 - protein, 9 aa, Artificial Sequence
  Description of Artificial Sequence: Synthetic peptide
ESDKEERMT

SEQ ID NO: 43954 - protein, 9 aa, Artificial Sequence
  Description of Artificial Sequence: Synthetic peptide
EVVKMPNHR

SEQ ID NO: 43955 - protein, 9 aa, Artificial Sequence
  Description of Artificial Sequence: Synthetic peptide
EYIKWDGTP

SEQ ID NO: 43956 - protein, 9 aa, Artificial Sequence
  Description of Artificial Sequence: Synthetic peptide
FCQKIEYYH

SEQ ID NO: 43957 - protein, 9 aa, Artificial Sequence
  Description of Artificial Sequence: Synthetic peptide
FGPKLTWHT

SEQ ID NO: 43958 - protein, 9 aa, Artificial Sequence
  Description of Artificial Sequence: Synthetic peptide
GCGKCECWN

SEQ ID NO: 43959 - protein, 9 aa, Artificial Sequence
  Description of Artificial Sequence: Synthetic peptide
GTFKNPVHQ

SEQ ID NO: 43960 - protein, 9 aa, Artificial Sequence
  Description of Artificial Sequence: Synthetic peptide
GVTKLEVWP

SEQ ID NO: 43961 - protein, 9 aa, Artificial Sequence
  Description of Artificial Sequence: Synthetic peptide
GWDKKRDFR

SEQ ID NO: 43962 - protein, 9 aa, Artificial Sequence
  Description of Artificial Sequence: Synthetic peptide
IPIKLPPQG

SEQ ID NO: 43963 - protein, 9 aa, Artificial Sequence
  Description of Artificial Sequence: Synthetic peptide
LEAKVAQYY

SEQ ID NO: 43964 - protein, 9 aa, Artificial Sequence
  Description of Artificial Sequence: Synthetic peptide
MDCKYPRDQ

SEQ ID NO: 43965 - protein, 9 aa, Artificial Sequence
  Description of Artificial Sequence: Synthetic peptide
NDGKIQFSG

SEQ ID NO: 43966 - protein, 9 aa, Artificial Sequence
  Description of Artificial Sequence: Synthetic peptide
NLSKLAQMP

SEQ ID NO: 43967 - protein, 9 aa, Artificial Sequence
  Description of Artificial Sequence: Synthetic peptide
NLSKLTQMP

SEQ ID NO: 43968 - protein, 9 aa, Artificial Sequence
  Description of Artificial Sequence: Synthetic peptide
NYAKLFQDI

SEQ ID NO: 43969 - protein, 9 aa, Artificial Sequence
  Description of Artificial Sequence: Synthetic peptide
QKRKLQVYS

SEQ ID NO: 43970 - protein, 9 aa, Artificial Sequence
  Description of Artificial Sequence: Synthetic peptide
QPAKKFWDF

SEQ ID NO: 43971 - protein, 9 aa, Artificial Sequence
  Description of Artificial Sequence: Synthetic peptide
QSSKWMWPL

SEQ ID NO: 43972 - protein, 9 aa, Artificial Sequence
  Description of Artificial Sequence: Synthetic peptide
QWYKMGYNR

SEQ ID NO: 43973 - protein, 9 aa, Artificial Sequence
  Description of Artificial Sequence: Synthetic peptide
RGPKDTNVK

SEQ ID NO: 43974 - protein, 9 aa, Artificial Sequence
  Description of Artificial Sequence: Synthetic peptide
RSLKYEGQQ

SEQ ID NO: 43975 - protein, 9 aa, Artificial Sequence
  Description of Artificial Sequence: Synthetic peptide
SPNKSPFPG

SEQ ID NO: 43976 - protein, 9 aa, Artificial Sequence
  Description of Artificial Sequence: Synthetic peptide
SSIKPMLSP

SEQ ID NO: 43977 - protein, 9 aa, Artificial Sequence
  Description of Artificial Sequence: Synthetic peptide
SYHKQERCQ

SEQ ID NO: 43978 - protein, 9 aa, Artificial Sequence
  Description of Artificial Sequence: Synthetic peptide
TCVKAGLCL

SEQ ID NO: 43979 - protein, 9 aa, Artificial Sequence
  Description of Artificial Sequence: Synthetic peptide
TGLKVIGQH

SEQ ID NO: 43980 - protein, 9 aa, Artificial Sequence
  Description of Artificial Sequence: Synthetic peptide
TIMKPLCFA

SEQ ID NO: 43981 - protein, 9 aa, Artificial Sequence
  Description of Artificial Sequence: Synthetic peptide
TNHKFRCDR

SEQ ID NO: 43982 - protein, 9 aa, Artificial Sequence
  Description of Artificial Sequence: Synthetic peptide
TSSKCTMDA

SEQ ID NO: 43983 - protein, 9 aa, Artificial Sequence
  Description of Artificial Sequence: Synthetic peptide
VHPKVQRVT

SEQ ID NO: 43984 - protein, 9 aa, Artificial Sequence
  Description of Artificial Sequence: Synthetic peptide
YSDKMESSN

SEQ ID NO: 43985 - protein, 9 aa, Artificial Sequence
  Description of Artificial Sequence: Synthetic peptide
IHCMFGAGA

SEQ ID NO: 43986 - protein, 9 aa, Artificial Sequence
  Description of Artificial Sequence: Synthetic peptide
IQQYFNWCE

SEQ ID NO: 43987 - protein, 9 aa, Artificial Sequence
  Description of Artificial Sequence: Synthetic peptide
IRDMFEVGR

SEQ ID NO: 43988 - protein, 9 aa, Artificial Sequence
  Description of Artificial Sequence: Synthetic peptide
LEFEFYWDE

SEQ ID NO: 43989 - protein, 9 aa, Artificial Sequence
  Description of Artificial Sequence: Synthetic peptide
LIHPFARGN

SEQ ID NO: 43990 - protein, 9 aa, Artificial Sequence
  Description of Artificial Sequence: Synthetic peptide
LIQAFPRDT

SEQ ID NO: 43991 - protein, 9 aa, Artificial Sequence
  Description of Artificial Sequence: Synthetic peptide
LPTPFMAHL

SEQ ID NO: 43992 - protein, 9 aa, Artificial Sequence
  Description of Artificial Sequence: Synthetic peptide
LSRDFCNWF

SEQ ID NO: 43993 - protein, 9 aa, Artificial Sequence
  Description of Artificial Sequence: Synthetic peptide
LVTSFASML

SEQ ID NO: 43994 - protein, 9 aa, Artificial Sequence
  Description of Artificial Sequence: Synthetic peptide
MCDHFQMAY

SEQ ID NO: 43995 - protein, 9 aa, Artificial Sequence
  Description of Artificial Sequence: Synthetic peptide
MPRCFDAAA

SEQ ID NO: 43996 - protein, 9 aa, Artificial Sequence
  Description of Artificial Sequence: Synthetic peptide
MPVMFGLHC

SEQ ID NO: 43997 - protein, 9 aa, Artificial Sequence
  Description of Artificial Sequence: Synthetic peptide
NMYPFMKYQ

SEQ ID NO: 43998 - protein, 9 aa, Artificial Sequence
  Description of Artificial Sequence: Synthetic peptide
NWITFSGAV

SEQ ID NO: 43999 - protein, 9 aa, Artificial Sequence
  Description of Artificial Sequence: Synthetic peptide
QCDLFSEGY

SEQ ID NO: 44000 - protein, 9 aa, Artificial Sequence
  Description of Artificial Sequence: Synthetic peptide
QHSVFMQIP

SEQ ID NO: 44001 - protein, 9 aa, Artificial Sequence
  Description of Artificial Sequence: Synthetic peptide
QNIRFTTDM

SEQ ID NO: 44002 - protein, 9 aa, Artificial Sequence
  Description of Artificial Sequence: Synthetic peptide
QSNHFEQEK

SEQ ID NO: 44003 - protein, 9 aa, Artificial Sequence
  Description of Artificial Sequence: Synthetic peptide
QYGSFNQNV

SEQ ID NO: 44004 - protein, 9 aa, Artificial Sequence
  Description of Artificial Sequence: Synthetic peptide
REEIFSYMV

SEQ ID NO: 44005 - protein, 9 aa, Artificial Sequence
  Description of Artificial Sequence: Synthetic peptide
RGIVFSQDN

SEQ ID NO: 44006 - protein, 9 aa, Artificial Sequence
  Description of Artificial Sequence: Synthetic peptide
RKADFMHIT

SEQ ID NO: 44007 - protein, 9 aa, Artificial Sequence
  Description of Artificial Sequence: Synthetic peptide
RPIWFIFVL

SEQ ID NO: 44008 - protein, 9 aa, Artificial Sequence
  Description of Artificial Sequence: Synthetic peptide
RQQEFDRCR

SEQ ID NO: 44009 - protein, 9 aa, Artificial Sequence
  Description of Artificial Sequence: Synthetic peptide
RTDHFGHWE

SEQ ID NO: 44010 - protein, 9 aa, Artificial Sequence
  Description of Artificial Sequence: Synthetic peptide
RVEMFKWRT

SEQ ID NO: 44011 - protein, 9 aa, Artificial Sequence
  Description of Artificial Sequence: Synthetic peptide
SCHGFQNWP

SEQ ID NO: 44012 - protein, 9 aa, Artificial Sequence
  Description of Artificial Sequence: Synthetic peptide
SIGLFMKDS

SEQ ID NO: 44013 - protein, 9 aa, Artificial Sequence
  Description of Artificial Sequence: Synthetic peptide
SKEWFSGTS

SEQ ID NO: 44014 - protein, 9 aa, Artificial Sequence
  Description of Artificial Sequence: Synthetic peptide
SNAPFEQCN

SEQ ID NO: 44015 - protein, 9 aa, Artificial Sequence
  Description of Artificial Sequence: Synthetic peptide
SNLSFGLTA

SEQ ID NO: 44016 - protein, 9 aa, Artificial Sequence
  Description of Artificial Sequence: Synthetic peptide
SQGYFDANL

SEQ ID NO: 44017 - protein, 9 aa, Artificial Sequence
  Description of Artificial Sequence: Synthetic peptide
STQMFANVQ

SEQ ID NO: 44018 - protein, 9 aa, Artificial Sequence
  Description of Artificial Sequence: Synthetic peptide
TCMYFSCAL

SEQ ID NO: 44019 - protein, 9 aa, Artificial Sequence
  Description of Artificial Sequence: Synthetic peptide
TEAWFQSAF

SEQ ID NO: 44020 - protein, 9 aa, Artificial Sequence
  Description of Artificial Sequence: Synthetic peptide
TIRNFWLQN

SEQ ID NO: 44021 - protein, 9 aa, Artificial Sequence
  Description of Artificial Sequence: Synthetic peptide
TNMLFLVWP

SEQ ID NO: 44022 - protein, 9 aa, Artificial Sequence
  Description of Artificial Sequence: Synthetic peptide
TPCRFNSQR

SEQ ID NO: 44023 - protein, 9 aa, Artificial Sequence
  Description of Artificial Sequence: Synthetic peptide
TQSCFHLEN

SEQ ID NO: 44024 - protein, 9 aa, Artificial Sequence
  Description of Artificial Sequence: Synthetic peptide
TRQFFHHGD

SEQ ID NO: 44025 - protein, 9 aa, Artificial Sequence
  Description of Artificial Sequence: Synthetic peptide
TVEQFTNSV

SEQ ID NO: 44026 - protein, 9 aa, Artificial Sequence
  Description of Artificial Sequence: Synthetic peptide
TVRMFCRAI

SEQ ID NO: 44027 - protein, 9 aa, Artificial Sequence
  Description of Artificial Sequence: Synthetic peptide
TWHSFPNQE

SEQ ID NO: 44028 - protein, 9 aa, Artificial Sequence
  Description of Artificial Sequence: Synthetic peptide
TYISFQDEK

SEQ ID NO: 44029 - protein, 9 aa, Artificial Sequence
  Description of Artificial Sequence: Synthetic peptide
VSQSFDHVN

SEQ ID NO: 44030 - protein, 9 aa, Artificial Sequence
  Description of Artificial Sequence: Synthetic peptide
VWQPFSGDH

SEQ ID NO: 44031 - protein, 9 aa, Artificial Sequence
  Description of Artificial Sequence: Synthetic peptide
YCCWFEHRL

SEQ ID NO: 44032 - protein, 9 aa, Artificial Sequence
  Description of Artificial Sequence: Synthetic peptide
YGCHFQRQE

SEQ ID NO: 44033 - protein, 9 aa, Artificial Sequence
  Description of Artificial Sequence: Synthetic peptide
YHMGFTGMG

SEQ ID NO: 44034 - protein, 9 aa, Artificial Sequence
  Description of Artificial Sequence: Synthetic peptide
YMSSFTCHW

SEQ ID NO: 44035 - protein, 9 aa, Artificial Sequence
  Description of Artificial Sequence: Synthetic peptide
YPMTFRAAC

SEQ ID NO: 44036 - protein, 9 aa, Artificial Sequence
  Description of Artificial Sequence: Synthetic peptide
YYNNFICDK

SEQ ID NO: 44037 - protein, 9 aa, Artificial Sequence
  Description of Artificial Sequence: Synthetic peptide
ACVAFSQQM

SEQ ID NO: 44038 - protein, 9 aa, Artificial Sequence
  Description of Artificial Sequence: Synthetic peptide
AHEIFNLQV

SEQ ID NO: 44039 - protein, 9 aa, Artificial Sequence
  Description of Artificial Sequence: Synthetic peptide
AHTQFLSAD

SEQ ID NO: 44040 - protein, 9 aa, Artificial Sequence
  Description of Artificial Sequence: Synthetic peptide
AMQSFDMPG

SEQ ID NO: 44041 - protein, 9 aa, Artificial Sequence
  Description of Artificial Sequence: Synthetic peptide
ARFLFYFDV

SEQ ID NO: 44042 - protein, 9 aa, Artificial Sequence
  Description of Artificial Sequence: Synthetic peptide
CCVYFNRQM

SEQ ID NO: 44043 - protein, 9 aa, Artificial Sequence
  Description of Artificial Sequence: Synthetic peptide
CNIDFTADY

SEQ ID NO: 44044 - protein, 9 aa, Artificial Sequence
  Description of Artificial Sequence: Synthetic peptide
CSQIFWERG

SEQ ID NO: 44045 - protein, 9 aa, Artificial Sequence
  Description of Artificial Sequence: Synthetic peptide
CTPQFNRGF

SEQ ID NO: 44046 - protein, 9 aa, Artificial Sequence
  Description of Artificial Sequence: Synthetic peptide
DEIAFWDGE

SEQ ID NO: 44047 - protein, 9 aa, Artificial Sequence
  Description of Artificial Sequence: Synthetic peptide
DGLMFHQQR

SEQ ID NO: 44048 - protein, 9 aa, Artificial Sequence
  Description of Artificial Sequence: Synthetic peptide
DIDQFASVN

SEQ ID NO: 44049 - protein, 9 aa, Artificial Sequence
  Description of Artificial Sequence: Synthetic peptide
DREAFDMAS

SEQ ID NO: 44050 - protein, 9 aa, Artificial Sequence
  Description of Artificial Sequence: Synthetic peptide
DSQWFEHNA

SEQ ID NO: 44051 - protein, 9 aa, Artificial Sequence
  Description of Artificial Sequence: Synthetic peptide
DTGPFMLFQ

SEQ ID NO: 44052 - protein, 9 aa, Artificial Sequence
  Description of Artificial Sequence: Synthetic peptide
ETRPFEQVW

SEQ ID NO: 44053 - protein, 9 aa, Artificial Sequence
  Description of Artificial Sequence: Synthetic peptide
FTNRFQLMA

SEQ ID NO: 44054 - protein, 9 aa, Artificial Sequence
  Description of Artificial Sequence: Synthetic peptide
GCCHFCDHL

SEQ ID NO: 44055 - protein, 9 aa, Artificial Sequence
  Description of Artificial Sequence: Synthetic peptide
HRMYFLRWP

SEQ ID NO: 44056 - protein, 9 aa, Artificial Sequence
  Description of Artificial Sequence: Synthetic peptide
IICGFFAWS

SEQ ID NO: 44057 - protein, 9 aa, Artificial Sequence
  Description of Artificial Sequence: Synthetic peptide
LGHQFNNWT

SEQ ID NO: 44058 - protein, 9 aa, Artificial Sequence
  Description of Artificial Sequence: Synthetic peptide
MDGYFGFAV

SEQ ID NO: 44059 - protein, 9 aa, Artificial Sequence
  Description of Artificial Sequence: Synthetic peptide
MGSNFVKQF

SEQ ID NO: 44060 - protein, 9 aa, Artificial Sequence
  Description of Artificial Sequence: Synthetic peptide
NICGFFAWS

SEQ ID NO: 44061 - protein, 9 aa, Artificial Sequence
  Description of Artificial Sequence: Synthetic peptide
QHCQFEQAI

SEQ ID NO: 44062 - protein, 9 aa, Artificial Sequence
  Description of Artificial Sequence: Synthetic peptide
QKDIFPMQM

SEQ ID NO: 44063 - protein, 9 aa, Artificial Sequence
  Description of Artificial Sequence: Synthetic peptide
QMELFCQQD

SEQ ID NO: 44064 - protein, 9 aa, Artificial Sequence
  Description of Artificial Sequence: Synthetic peptide
QNTEFMDHY

SEQ ID NO: 44065 - protein, 9 aa, Artificial Sequence
  Description of Artificial Sequence: Synthetic peptide
QTSDFAMSS

SEQ ID NO: 44066 - protein, 9 aa, Artificial Sequence
  Description of Artificial Sequence: Synthetic peptide
QVMPFVIEG

SEQ ID NO: 44067 - protein, 9 aa, Artificial Sequence
  Description of Artificial Sequence: Synthetic peptide
SKMNFGTAN

SEQ ID NO: 44068 - protein, 9 aa, Artificial Sequence
  Description of Artificial Sequence: Synthetic peptide
SKTEFSLKM

SEQ ID NO: 44069 - protein, 9 aa, Artificial Sequence
  Description of Artificial Sequence: Synthetic peptide
TGDLFCCHL

SEQ ID NO: 44070 - protein, 9 aa, Artificial Sequence
  Description of Artificial Sequence: Synthetic peptide
TQGLFAQVG

SEQ ID NO: 44071 - protein, 9 aa, Artificial Sequence
  Description of Artificial Sequence: Synthetic peptide
VCFHFRDAA

SEQ ID NO: 44072 - protein, 9 aa, Artificial Sequence
  Description of Artificial Sequence: Synthetic peptide
VCMLFQHEA

SEQ ID NO: 44073 - protein, 9 aa, Artificial Sequence
  Description of Artificial Sequence: Synthetic peptide
VHSRFGQYT

SEQ ID NO: 44074 - protein, 9 aa, Artificial Sequence
  Description of Artificial Sequence: Synthetic peptide
WQPRFYHIW

SEQ ID NO: 44075 - protein, 9 aa, Artificial Sequence
  Description of Artificial Sequence: Synthetic peptide
YEDPFRHYS

SEQ ID NO: 44076 - protein, 9 aa, Artificial Sequence
  Description of Artificial Sequence: Synthetic peptide
ICHSGNRLL

SEQ ID NO: 44077 - protein, 9 aa, Artificial Sequence
  Description of Artificial Sequence: Synthetic peptide
ICQGSNSMA

SEQ ID NO: 44078 - protein, 9 aa, Artificial Sequence
  Description of Artificial Sequence: Synthetic peptide
IGTVRNWCW

SEQ ID NO: 44079 - protein, 9 aa, Artificial Sequence
  Description of Artificial Sequence: Synthetic peptide
IICPTNEYM

SEQ ID NO: 44080 - protein, 9 aa, Artificial Sequence
  Description of Artificial Sequence: Synthetic peptide
IKILLNEMT

SEQ ID NO: 44081 - protein, 9 aa, Artificial Sequence
  Description of Artificial Sequence: Synthetic peptide
IQCFHNMEE

SEQ ID NO: 44082 - protein, 9 aa, Artificial Sequence
  Description of Artificial Sequence: Synthetic peptide
IVMCHNVYP

SEQ ID NO: 44083 - protein, 9 aa, Artificial Sequence
  Description of Artificial Sequence: Synthetic peptide
IVNLNNHHW

SEQ ID NO: 44084 - protein, 9 aa, Artificial Sequence
  Description of Artificial Sequence: Synthetic peptide
LCAQHNIVC

SEQ ID NO: 44085 - protein, 9 aa, Artificial Sequence
  Description of Artificial Sequence: Synthetic peptide
LETEGNPFY

SEQ ID NO: 44086 - protein, 9 aa, Artificial Sequence
  Description of Artificial Sequence: Synthetic peptide
LGIGNNWEQ

SEQ ID NO: 44087 - protein, 9 aa, Artificial Sequence
  Description of Artificial Sequence: Synthetic peptide
LITPPNWWH

SEQ ID NO: 44088 - protein, 9 aa, Artificial Sequence
  Description of Artificial Sequence: Synthetic peptide
LLEIMNEQC

SEQ ID NO: 44089 - protein, 9 aa, Artificial Sequence
  Description of Artificial Sequence: Synthetic peptide
LLFWYNHMS

SEQ ID NO: 44090 - protein, 9 aa, Artificial Sequence
  Description of Artificial Sequence: Synthetic peptide
LMILRNTHQ

SEQ ID NO: 44091 - protein, 9 aa, Artificial Sequence
  Description of Artificial Sequence: Synthetic peptide
LQMPYNWQT

SEQ ID NO: 44092 - protein, 9 aa, Artificial Sequence
  Description of Artificial Sequence: Synthetic peptide
LRHICNCGQ

SEQ ID NO: 44093 - protein, 9 aa, Artificial Sequence
  Description of Artificial Sequence: Synthetic peptide
LSLSKNCAG

SEQ ID NO: 44094 - protein, 9 aa, Artificial Sequence
  Description of Artificial Sequence: Synthetic peptide
LTPLANQYC

SEQ ID NO: 44095 - protein, 9 aa, Artificial Sequence
  Description of Artificial Sequence: Synthetic peptide
LTRFNNDLP

SEQ ID NO: 44096 - protein, 9 aa, Artificial Sequence
  Description of Artificial Sequence: Synthetic peptide
LVPRINMLW

SEQ ID NO: 44097 - protein, 9 aa, Artificial Sequence
  Description of Artificial Sequence: Synthetic peptide
LYELHNTWD

SEQ ID NO: 44098 - protein, 9 aa, Artificial Sequence
  Description of Artificial Sequence: Synthetic peptide
MFIQDNAPT

SEQ ID NO: 44099 - protein, 9 aa, Artificial Sequence
  Description of Artificial Sequence: Synthetic peptide
MLLYPNNTN

SEQ ID NO: 44100 - protein, 9 aa, Artificial Sequence
  Description of Artificial Sequence: Synthetic peptide
MMCSNNSHR

SEQ ID NO: 44101 - protein, 9 aa, Artificial Sequence
  Description of Artificial Sequence: Synthetic peptide
MQSPENTVY

SEQ ID NO: 44102 - protein, 9 aa, Artificial Sequence
  Description of Artificial Sequence: Synthetic peptide
MTCLQNQSE

SEQ ID NO: 44103 - protein, 9 aa, Artificial Sequence
  Description of Artificial Sequence: Synthetic peptide
MTIANNIRN

SEQ ID NO: 44104 - protein, 9 aa, Artificial Sequence
  Description of Artificial Sequence: Synthetic peptide
MTYNYNSKD

SEQ ID NO: 44105 - protein, 9 aa, Artificial Sequence
  Description of Artificial Sequence: Synthetic peptide
MVWICNAPR

SEQ ID NO: 44106 - protein, 9 aa, Artificial Sequence
  Description of Artificial Sequence: Synthetic peptide
NCGYKNNKA

SEQ ID NO: 44107 - protein, 9 aa, Artificial Sequence
  Description of Artificial Sequence: Synthetic peptide
NICFVNDAL

SEQ ID NO: 44108 - protein, 9 aa, Artificial Sequence
  Description of Artificial Sequence: Synthetic peptide
NILSPNCYE

SEQ ID NO: 44109 - protein, 9 aa, Artificial Sequence
  Description of Artificial Sequence: Synthetic peptide
NKVGMNYMQ

SEQ ID NO: 44110 - protein, 9 aa, Artificial Sequence
  Description of Artificial Sequence: Synthetic peptide
NMCHHNWRD

SEQ ID NO: 44111 - protein, 9 aa, Artificial Sequence
  Description of Artificial Sequence: Synthetic peptide
NPAYKNWGW

SEQ ID NO: 44112 - protein, 9 aa, Artificial Sequence
  Description of Artificial Sequence: Synthetic peptide
NQIYTNPWG

SEQ ID NO: 44113 - protein, 9 aa, Artificial Sequence
  Description of Artificial Sequence: Synthetic peptide
NSLISNAWT

SEQ ID NO: 44114 - protein, 9 aa, Artificial Sequence
  Description of Artificial Sequence: Synthetic peptide
NTMTPNFRK

SEQ ID NO: 44115 - protein, 9 aa, Artificial Sequence
  Description of Artificial Sequence: Synthetic peptide
NYVAKNYMV

SEQ ID NO: 44116 - protein, 9 aa, Artificial Sequence
  Description of Artificial Sequence: Synthetic peptide
PKFIANRQE

SEQ ID NO: 44117 - protein, 9 aa, Artificial Sequence
  Description of Artificial Sequence: Synthetic peptide
PNYWINYQN

SEQ ID NO: 44118 - protein, 9 aa, Artificial Sequence
  Description of Artificial Sequence: Synthetic peptide
PRCYINWRY

SEQ ID NO: 44119 - protein, 9 aa, Artificial Sequence
  Description of Artificial Sequence: Synthetic peptide
PWQFTNLEK

SEQ ID NO: 44120 - protein, 9 aa, Artificial Sequence
  Description of Artificial Sequence: Synthetic peptide
QCCHPNGYQ

SEQ ID NO: 44121 - protein, 9 aa, Artificial Sequence
  Description of Artificial Sequence: Synthetic peptide
QNCWYNFFR

SEQ ID NO: 44122 - protein, 9 aa, Artificial Sequence
  Description of Artificial Sequence: Synthetic peptide
QQCNTNTDS

SEQ ID NO: 44123 - protein, 9 aa, Artificial Sequence
  Description of Artificial Sequence: Synthetic peptide
QVVTVNASD

SEQ ID NO: 44124 - protein, 9 aa, Artificial Sequence
  Description of Artificial Sequence: Synthetic peptide
RIGIANDWV

SEQ ID NO: 44125 - protein, 9 aa, Artificial Sequence
  Description of Artificial Sequence: Synthetic peptide
SDGTINRMN

SEQ ID NO: 44126 - protein, 9 aa, Artificial Sequence
  Description of Artificial Sequence: Synthetic peptide
SHLQCNYMR

SEQ ID NO: 44127 - protein, 9 aa, Artificial Sequence
  Description of Artificial Sequence: Synthetic peptide
SLTVWNQNG

SEQ ID NO: 44128 - protein, 9 aa, Artificial Sequence
  Description of Artificial Sequence: Synthetic peptide
STMWRNRES

SEQ ID NO: 44129 - protein, 9 aa, Artificial Sequence
  Description of Artificial Sequence: Synthetic peptide
STVYWNMET

SEQ ID NO: 44130 - protein, 9 aa, Artificial Sequence
  Description of Artificial Sequence: Synthetic peptide
SYTSGNESW

SEQ ID NO: 44131 - protein, 9 aa, Artificial Sequence
  Description of Artificial Sequence: Synthetic peptide
TGAPGNWFH

SEQ ID NO: 44132 - protein, 9 aa, Artificial Sequence
  Description of Artificial Sequence: Synthetic peptide
TRNAYNCHQ

SEQ ID NO: 44133 - protein, 9 aa, Artificial Sequence
  Description of Artificial Sequence: Synthetic peptide
TSSWVNWDP

SEQ ID NO: 44134 - protein, 9 aa, Artificial Sequence
  Description of Artificial Sequence: Synthetic peptide
TTMPENIPL

SEQ ID NO: 44135 - protein, 9 aa, Artificial Sequence
  Description of Artificial Sequence: Synthetic peptide
TTRFHNNVM

SEQ ID NO: 44136 - protein, 9 aa, Artificial Sequence
  Description of Artificial Sequence: Synthetic peptide
TVWNTNTGW

SEQ ID NO: 44137 - protein, 9 aa, Artificial Sequence
  Description of Artificial Sequence: Synthetic peptide
VCRNGNRQA

SEQ ID NO: 44138 - protein, 9 aa, Artificial Sequence
  Description of Artificial Sequence: Synthetic peptide
VIFPENSHY

SEQ ID NO: 44139 - protein, 9 aa, Artificial Sequence
  Description of Artificial Sequence: Synthetic peptide
VLTWDNPDE

SEQ ID NO: 44140 - protein, 9 aa, Artificial Sequence
  Description of Artificial Sequence: Synthetic peptide
VTHATNVLE

SEQ ID NO: 44141 - protein, 9 aa, Artificial Sequence
  Description of Artificial Sequence: Synthetic peptide
WNGFMNQGY

SEQ ID NO: 44142 - protein, 9 aa, Artificial Sequence
  Description of Artificial Sequence: Synthetic peptide
WPVRLNEYK

SEQ ID NO: 44143 - protein, 9 aa, Artificial Sequence
  Description of Artificial Sequence: Synthetic peptide
YIAVPNKMS

SEQ ID NO: 44144 - protein, 9 aa, Artificial Sequence
  Description of Artificial Sequence: Synthetic peptide
YYECRNYSD

SEQ ID NO: 44145 - protein, 9 aa, Artificial Sequence
  Description of Artificial Sequence: Synthetic peptide
AKVYSNLYG

SEQ ID NO: 44146 - protein, 9 aa, Artificial Sequence
  Description of Artificial Sequence: Synthetic peptide
ATILVNRDG

SEQ ID NO: 44147 - protein, 9 aa, Artificial Sequence
  Description of Artificial Sequence: Synthetic peptide
AWFTHNALP

SEQ ID NO: 44148 - protein, 9 aa, Artificial Sequence
  Description of Artificial Sequence: Synthetic peptide
CIHHRNDKV

SEQ ID NO: 44149 - protein, 9 aa, Artificial Sequence
  Description of Artificial Sequence: Synthetic peptide
CNYDTNLRP

SEQ ID NO: 44150 - protein, 9 aa, Artificial Sequence
  Description of Artificial Sequence: Synthetic peptide
CTQSINGLI

SEQ ID NO: 44151 - protein, 9 aa, Artificial Sequence
  Description of Artificial Sequence: Synthetic peptide
CTVLINCRD

SEQ ID NO: 44152 - protein, 9 aa, Artificial Sequence
  Description of Artificial Sequence: Synthetic peptide
CVTWENVMT

SEQ ID NO: 44153 - protein, 9 aa, Artificial Sequence
  Description of Artificial Sequence: Synthetic peptide
DLVHCNNHM

SEQ ID NO: 44154 - protein, 9 aa, Artificial Sequence
  Description of Artificial Sequence: Synthetic peptide
DRGYYNSMM

SEQ ID NO: 44155 - protein, 9 aa, Artificial Sequence
  Description of Artificial Sequence: Synthetic peptide
DTIHENEGV

SEQ ID NO: 44156 - protein, 9 aa, Artificial Sequence
  Description of Artificial Sequence: Synthetic peptide
EPHIMNSHE

SEQ ID NO: 44157 - protein, 9 aa, Artificial Sequence
  Description of Artificial Sequence: Synthetic peptide
EQRVYNHQY

SEQ ID NO: 44158 - protein, 9 aa, Artificial Sequence
  Description of Artificial Sequence: Synthetic peptide
FTVTMNCTA

SEQ ID NO: 44159 - protein, 9 aa, Artificial Sequence
  Description of Artificial Sequence: Synthetic peptide
GGALDNGQC

SEQ ID NO: 44160 - protein, 9 aa, Artificial Sequence
  Description of Artificial Sequence: Synthetic peptide
GPDRYNEES

SEQ ID NO: 44161 - protein, 9 aa, Artificial Sequence
  Description of Artificial Sequence: Synthetic peptide
GSLALNVRQ

SEQ ID NO: 44162 - protein, 9 aa, Artificial Sequence
  Description of Artificial Sequence: Synthetic peptide
GTQRDNTGF

SEQ ID NO: 44163 - protein, 9 aa, Artificial Sequence
  Description of Artificial Sequence: Synthetic peptide
HCICNNSGA

SEQ ID NO: 44164 - protein, 9 aa, Artificial Sequence
  Description of Artificial Sequence: Synthetic peptide
HMTLGNLCP

SEQ ID NO: 44165 - protein, 9 aa, Artificial Sequence
  Description of Artificial Sequence: Synthetic peptide
ICGWENCSE

SEQ ID NO: 44166 - protein, 9 aa, Artificial Sequence
  Description of Artificial Sequence: Synthetic peptide
LCINVNPSI

SEQ ID NO: 44167 - protein, 9 aa, Artificial Sequence
  Description of Artificial Sequence: Synthetic peptide
LFTEINGCY

SEQ ID NO: 44168 - protein, 9 aa, Artificial Sequence
  Description of Artificial Sequence: Synthetic peptide
LMCQMNNRS

SEQ ID NO: 44169 - protein, 9 aa, Artificial Sequence
  Description of Artificial Sequence: Synthetic peptide
MPGFENKMP

SEQ ID NO: 44170 - protein, 9 aa, Artificial Sequence
  Description of Artificial Sequence: Synthetic peptide
MPRDENHIG

SEQ ID NO: 44171 - protein, 9 aa, Artificial Sequence
  Description of Artificial Sequence: Synthetic peptide
NFDCSNDQT

SEQ ID NO: 44172 - protein, 9 aa, Artificial Sequence
  Description of Artificial Sequence: Synthetic peptide
NLLVSNVTT

SEQ ID NO: 44173 - protein, 9 aa, Artificial Sequence
  Description of Artificial Sequence: Synthetic peptide
PDGPMNLLG

SEQ ID NO: 44174 - protein, 9 aa, Artificial Sequence
  Description of Artificial Sequence: Synthetic peptide
PMMMANRIA

SEQ ID NO: 44175 - protein, 9 aa, Artificial Sequence
  Description of Artificial Sequence: Synthetic peptide
QHRQANGIH

SEQ ID NO: 44176 - protein, 9 aa, Artificial Sequence
  Description of Artificial Sequence: Synthetic peptide
QMSYVNQYR

SEQ ID NO: 44177 - protein, 9 aa, Artificial Sequence
  Description of Artificial Sequence: Synthetic peptide
QSVSNNRRA

SEQ ID NO: 44178 - protein, 9 aa, Artificial Sequence
  Description of Artificial Sequence: Synthetic peptide
QTFMTNFDT

SEQ ID NO: 44179 - protein, 9 aa, Artificial Sequence
  Description of Artificial Sequence: Synthetic peptide
QYSPANQWD

SEQ ID NO: 44180 - protein, 9 aa, Artificial Sequence
  Description of Artificial Sequence: Synthetic peptide
RTFLTNPKD

SEQ ID NO: 44181 - protein, 9 aa, Artificial Sequence
  Description of Artificial Sequence: Synthetic peptide
SMHDYNFNV

SEQ ID NO: 44182 - protein, 9 aa, Artificial Sequence
  Description of Artificial Sequence: Synthetic peptide
STELKNMER

SEQ ID NO: 44183 - protein, 9 aa, Artificial Sequence
  Description of Artificial Sequence: Synthetic peptide
SVLYSNYFA

SEQ ID NO: 44184 - protein, 9 aa, Artificial Sequence
  Description of Artificial Sequence: Synthetic peptide
TGAMTNYCY

SEQ ID NO: 44185 - protein, 9 aa, Artificial Sequence
  Description of Artificial Sequence: Synthetic peptide
TMMQNNTEV

SEQ ID NO: 44186 - protein, 9 aa, Artificial Sequence
  Description of Artificial Sequence: Synthetic peptide
TRDTHNSVD

SEQ ID NO: 44187 - protein, 9 aa, Artificial Sequence
  Description of Artificial Sequence: Synthetic peptide
TRIHVNRYG

SEQ ID NO: 44188 - protein, 9 aa, Artificial Sequence
  Description of Artificial Sequence: Synthetic peptide
TTWLDNEDA

SEQ ID NO: 44189 - protein, 9 aa, Artificial Sequence
  Description of Artificial Sequence: Synthetic peptide
VIRPINQEW

SEQ ID NO: 44190 - protein, 9 aa, Artificial Sequence
  Description of Artificial Sequence: Synthetic peptide
WQAPHNQSY

SEQ ID NO: 44191 - protein, 9 aa, Artificial Sequence
  Description of Artificial Sequence: Synthetic peptide
YVITANNHQ

SEQ ID NO: 44192 - protein, 9 aa, Artificial Sequence
  Description of Artificial Sequence: Synthetic peptide
ICQHIGSWG

SEQ ID NO: 44193 - protein, 9 aa, Artificial Sequence
  Description of Artificial Sequence: Synthetic peptide
IDHDYASDS

SEQ ID NO: 44194 - protein, 9 aa, Artificial Sequence
  Description of Artificial Sequence: Synthetic peptide
ILIMILSHS

SEQ ID NO: 44195 - protein, 9 aa, Artificial Sequence
  Description of Artificial Sequence: Synthetic peptide
IPRFVYSPV

SEQ ID NO: 44196 - protein, 9 aa, Artificial Sequence
  Description of Artificial Sequence: Synthetic peptide
ITVADRSSH

SEQ ID NO: 44197 - protein, 9 aa, Artificial Sequence
  Description of Artificial Sequence: Synthetic peptide
LEGATESLW

SEQ ID NO: 44198 - protein, 9 aa, Artificial Sequence
  Description of Artificial Sequence: Synthetic peptide
LLPLHGSWH

SEQ ID NO: 44199 - protein, 9 aa, Artificial Sequence
  Description of Artificial Sequence: Synthetic peptide
MCLAPTSMH

SEQ ID NO: 44200 - protein, 9 aa, Artificial Sequence
  Description of Artificial Sequence: Synthetic peptide
MCSPEPSLQ

SEQ ID NO: 44201 - protein, 9 aa, Artificial Sequence
  Description of Artificial Sequence: Synthetic peptide
MEHQQDSRF

SEQ ID NO: 44202 - protein, 9 aa, Artificial Sequence
  Description of Artificial Sequence: Synthetic peptide
MGDDSMSEH

SEQ ID NO: 44203 - protein, 9 aa, Artificial Sequence
  Description of Artificial Sequence: Synthetic peptide
MPRTCMSTN

SEQ ID NO: 44204 - protein, 9 aa, Artificial Sequence
  Description of Artificial Sequence: Synthetic peptide
NCEQWKSMF

SEQ ID NO: 44205 - protein, 9 aa, Artificial Sequence
  Description of Artificial Sequence: Synthetic peptide
NDQTSSSAW

SEQ ID NO: 44206 - protein, 9 aa, Artificial Sequence
  Description of Artificial Sequence: Synthetic peptide
NIQFHTSGQ

SEQ ID NO: 44207 - protein, 9 aa, Artificial Sequence
  Description of Artificial Sequence: Synthetic peptide
NKDVDRSHV

SEQ ID NO: 44208 - protein, 9 aa, Artificial Sequence
  Description of Artificial Sequence: Synthetic peptide
NLVRWESGW

SEQ ID NO: 44209 - protein, 9 aa, Artificial Sequence
  Description of Artificial Sequence: Synthetic peptide
NMSPWMSDR

SEQ ID NO: 44210 - protein, 9 aa, Artificial Sequence
  Description of Artificial Sequence: Synthetic peptide
NPCIVISSV

SEQ ID NO: 44211 - protein, 9 aa, Artificial Sequence
  Description of Artificial Sequence: Synthetic peptide
NSYHLESMD

SEQ ID NO: 44212 - protein, 9 aa, Artificial Sequence
  Description of Artificial Sequence: Synthetic peptide
NVAMYASSE

SEQ ID NO: 44213 - protein, 9 aa, Artificial Sequence
  Description of Artificial Sequence: Synthetic peptide
NVLCVKSVQ

SEQ ID NO: 44214 - protein, 9 aa, Artificial Sequence
  Description of Artificial Sequence: Synthetic peptide
NVMICHSPA

SEQ ID NO: 44215 - protein, 9 aa, Artificial Sequence
  Description of Artificial Sequence: Synthetic peptide
NYCTLMSAC

SEQ ID NO: 44216 - protein, 9 aa, Artificial Sequence
  Description of Artificial Sequence: Synthetic peptide
PILITHSVE

SEQ ID NO: 44217 - protein, 9 aa, Artificial Sequence
  Description of Artificial Sequence: Synthetic peptide
QIGWEASSL

SEQ ID NO: 44218 - protein, 9 aa, Artificial Sequence
  Description of Artificial Sequence: Synthetic peptide
QIVELHSLG

SEQ ID NO: 44219 - protein, 9 aa, Artificial Sequence
  Description of Artificial Sequence: Synthetic peptide
QIVQAMSSE

SEQ ID NO: 44220 - protein, 9 aa, Artificial Sequence
  Description of Artificial Sequence: Synthetic peptide
QLADNHSRP

SEQ ID NO: 44221 - protein, 9 aa, Artificial Sequence
  Description of Artificial Sequence: Synthetic peptide
QSLYDRSGT

SEQ ID NO: 44222 - protein, 9 aa, Artificial Sequence
  Description of Artificial Sequence: Synthetic peptide
QSTCYFSNC

SEQ ID NO: 44223 - protein, 9 aa, Artificial Sequence
  Description of Artificial Sequence: Synthetic peptide
QTREGVSYY

SEQ ID NO: 44224 - protein, 9 aa, Artificial Sequence
  Description of Artificial Sequence: Synthetic peptide
QVDMARSSF

SEQ ID NO: 44225 - protein, 9 aa, Artificial Sequence
  Description of Artificial Sequence: Synthetic peptide
QVMENSSWA

SEQ ID NO: 44226 - protein, 9 aa, Artificial Sequence
  Description of Artificial Sequence: Synthetic peptide
RECVHLSCP

SEQ ID NO: 44227 - protein, 9 aa, Artificial Sequence
  Description of Artificial Sequence: Synthetic peptide
REGLLWSNS

SEQ ID NO: 44228 - protein, 9 aa, Artificial Sequence
  Description of Artificial Sequence: Synthetic peptide
RISQQWSRS

SEQ ID NO: 44229 - protein, 9 aa, Artificial Sequence
  Description of Artificial Sequence: Synthetic peptide
RTIQKESHV

SEQ ID NO: 44230 - protein, 9 aa, Artificial Sequence
  Description of Artificial Sequence: Synthetic peptide
RWCMKISAN

SEQ ID NO: 44231 - protein, 9 aa, Artificial Sequence
  Description of Artificial Sequence: Synthetic peptide
SCTHVMSNA

SEQ ID NO: 44232 - protein, 9 aa, Artificial Sequence
  Description of Artificial Sequence: Synthetic peptide
SHELQLSGL

SEQ ID NO: 44233 - protein, 9 aa, Artificial Sequence
  Description of Artificial Sequence: Synthetic peptide
SHMNQASMP

SEQ ID NO: 44234 - protein, 9 aa, Artificial Sequence
  Description of Artificial Sequence: Synthetic peptide
SITRWVSAE

SEQ ID NO: 44235 - protein, 9 aa, Artificial Sequence
  Description of Artificial Sequence: Synthetic peptide
SLYMEMSWQ

SEQ ID NO: 44236 - protein, 9 aa, Artificial Sequence
  Description of Artificial Sequence: Synthetic peptide
SWCSIHSPN

SEQ ID NO: 44237 - protein, 9 aa, Artificial Sequence
  Description of Artificial Sequence: Synthetic peptide
SYIEWGSWM

SEQ ID NO: 44238 - protein, 9 aa, Artificial Sequence
  Description of Artificial Sequence: Synthetic peptide
TCERKRSDK

SEQ ID NO: 44239 - protein, 9 aa, Artificial Sequence
  Description of Artificial Sequence: Synthetic peptide
TCTYDKSQI

SEQ ID NO: 44240 - protein, 9 aa, Artificial Sequence
  Description of Artificial Sequence: Synthetic peptide
THIQCRSMM

SEQ ID NO: 44241 - protein, 9 aa, Artificial Sequence
  Description of Artificial Sequence: Synthetic peptide
THWWQPSSG

SEQ ID NO: 44242 - protein, 9 aa, Artificial Sequence
  Description of Artificial Sequence: Synthetic peptide
TKHMIQSYG

SEQ ID NO: 44243 - protein, 9 aa, Artificial Sequence
  Description of Artificial Sequence: Synthetic peptide
TSARCISAE

SEQ ID NO: 44244 - protein, 9 aa, Artificial Sequence
  Description of Artificial Sequence: Synthetic peptide
TSTHVKSYQ

SEQ ID NO: 44245 - protein, 9 aa, Artificial Sequence
  Description of Artificial Sequence: Synthetic peptide
TTHFAVSGI

SEQ ID NO: 44246 - protein, 9 aa, Artificial Sequence
  Description of Artificial Sequence: Synthetic peptide
TTSHCVSPS

SEQ ID NO: 44247 - protein, 9 aa, Artificial Sequence
  Description of Artificial Sequence: Synthetic peptide
TVHMCQSFV

SEQ ID NO: 44248 - protein, 9 aa, Artificial Sequence
  Description of Artificial Sequence: Synthetic peptide
VGTAAHSQR

SEQ ID NO: 44249 - protein, 9 aa, Artificial Sequence
  Description of Artificial Sequence: Synthetic peptide
VIAQELSAK

SEQ ID NO: 44250 - protein, 9 aa, Artificial Sequence
  Description of Artificial Sequence: Synthetic peptide
VSDWGHSDS

SEQ ID NO: 44251 - protein, 9 aa, Artificial Sequence
  Description of Artificial Sequence: Synthetic peptide
VWWREDSTN

SEQ ID NO: 44252 - protein, 9 aa, Artificial Sequence
  Description of Artificial Sequence: Synthetic peptide
WLEPCVSSL

SEQ ID NO: 44253 - protein, 9 aa, Artificial Sequence
  Description of Artificial Sequence: Synthetic peptide
WPETVGSSE

SEQ ID NO: 44254 - protein, 9 aa, Artificial Sequence
  Description of Artificial Sequence: Synthetic peptide
WYAPAESSN

SEQ ID NO: 44255 - protein, 9 aa, Artificial Sequence
  Description of Artificial Sequence: Synthetic peptide
YCCRPVSDF

SEQ ID NO: 44256 - protein, 9 aa, Artificial Sequence
  Description of Artificial Sequence: Synthetic peptide
YHMDGDSRH

SEQ ID NO: 44257 - protein, 9 aa, Artificial Sequence
  Description of Artificial Sequence: Synthetic peptide
ADETQYSCH

SEQ ID NO: 44258 - protein, 9 aa, Artificial Sequence
  Description of Artificial Sequence: Synthetic peptide
AFNQHTSMD

SEQ ID NO: 44259 - protein, 9 aa, Artificial Sequence
  Description of Artificial Sequence: Synthetic peptide
AISPWMSCA

SEQ ID NO: 44260 - protein, 9 aa, Artificial Sequence
  Description of Artificial Sequence: Synthetic peptide
AMYNVSSAA

SEQ ID NO: 44261 - protein, 9 aa, Artificial Sequence
  Description of Artificial Sequence: Synthetic peptide
AMYQNPSPC

SEQ ID NO: 44262 - protein, 9 aa, Artificial Sequence
  Description of Artificial Sequence: Synthetic peptide
ARAEWKSKD

SEQ ID NO: 44263 - protein, 9 aa, Artificial Sequence
  Description of Artificial Sequence: Synthetic peptide
CVCADTSVF

SEQ ID NO: 44264 - protein, 9 aa, Artificial Sequence
  Description of Artificial Sequence: Synthetic peptide
DIELVTSEQ

SEQ ID NO: 44265 - protein, 9 aa, Artificial Sequence
  Description of Artificial Sequence: Synthetic peptide
ELAAPHSQV

SEQ ID NO: 44266 - protein, 9 aa, Artificial Sequence
  Description of Artificial Sequence: Synthetic peptide
ERATLKSMC

SEQ ID NO: 44267 - protein, 9 aa, Artificial Sequence
  Description of Artificial Sequence: Synthetic peptide
ERMWKTSDN

SEQ ID NO: 44268 - protein, 9 aa, Artificial Sequence
  Description of Artificial Sequence: Synthetic peptide
ESIRLRSSQ

SEQ ID NO: 44269 - protein, 9 aa, Artificial Sequence
  Description of Artificial Sequence: Synthetic peptide
FNAVHMSLE

SEQ ID NO: 44270 - protein, 9 aa, Artificial Sequence
  Description of Artificial Sequence: Synthetic peptide
GGRFNQSWA

SEQ ID NO: 44271 - protein, 9 aa, Artificial Sequence
  Description of Artificial Sequence: Synthetic peptide
GHFMTLSKG

SEQ ID NO: 44272 - protein, 9 aa, Artificial Sequence
  Description of Artificial Sequence: Synthetic peptide
GNERMFSSA

SEQ ID NO: 44273 - protein, 9 aa, Artificial Sequence
  Description of Artificial Sequence: Synthetic peptide
HLTMWESFD

SEQ ID NO: 44274 - protein, 9 aa, Artificial Sequence
  Description of Artificial Sequence: Synthetic peptide
LCTFNGSNG

SEQ ID NO: 44275 - protein, 9 aa, Artificial Sequence
  Description of Artificial Sequence: Synthetic peptide
LKGTMMSPI

SEQ ID NO: 44276 - protein, 9 aa, Artificial Sequence
  Description of Artificial Sequence: Synthetic peptide
LTYLKRSIG

SEQ ID NO: 44277 - protein, 9 aa, Artificial Sequence
  Description of Artificial Sequence: Synthetic peptide
MLNLHGSDM

SEQ ID NO: 44278 - protein, 9 aa, Artificial Sequence
  Description of Artificial Sequence: Synthetic peptide
MSIPASSEV

SEQ ID NO: 44279 - protein, 9 aa, Artificial Sequence
  Description of Artificial Sequence: Synthetic peptide
NIGYRKSSG

SEQ ID NO: 44280 - protein, 9 aa, Artificial Sequence
  Description of Artificial Sequence: Synthetic peptide
NRESDVSTG

SEQ ID NO: 44281 - protein, 9 aa, Artificial Sequence
  Description of Artificial Sequence: Synthetic peptide
PCQWPVSRA

SEQ ID NO: 44282 - protein, 9 aa, Artificial Sequence
  Description of Artificial Sequence: Synthetic peptide
PCVYECSLH

SEQ ID NO: 44283 - protein, 9 aa, Artificial Sequence
  Description of Artificial Sequence: Synthetic peptide
PTIWLHSYL

SEQ ID NO: 44284 - protein, 9 aa, Artificial Sequence
  Description of Artificial Sequence: Synthetic peptide
PVCPWGSFD

SEQ ID NO: 44285 - protein, 9 aa, Artificial Sequence
  Description of Artificial Sequence: Synthetic peptide
PWVAVESAE

SEQ ID NO: 44286 - protein, 9 aa, Artificial Sequence
  Description of Artificial Sequence: Synthetic peptide
QQTRHRSCV

SEQ ID NO: 44287 - protein, 9 aa, Artificial Sequence
  Description of Artificial Sequence: Synthetic peptide
RTEWHQSQA

SEQ ID NO: 44288 - protein, 9 aa, Artificial Sequence
  Description of Artificial Sequence: Synthetic peptide
SMQPTGSGW

SEQ ID NO: 44289 - protein, 9 aa, Artificial Sequence
  Description of Artificial Sequence: Synthetic peptide
STQWEQSMQ

SEQ ID NO: 44290 - protein, 9 aa, Artificial Sequence
  Description of Artificial Sequence: Synthetic peptide
SWVSKFSEI

SEQ ID NO: 44291 - protein, 9 aa, Artificial Sequence
  Description of Artificial Sequence: Synthetic peptide
TNMPMPSYE

SEQ ID NO: 44292 - protein, 9 aa, Artificial Sequence
  Description of Artificial Sequence: Synthetic peptide
TQGRMYSCW

SEQ ID NO: 44293 - protein, 9 aa, Artificial Sequence
  Description of Artificial Sequence: Synthetic peptide
TWGFNRSYC

SEQ ID NO: 44294 - protein, 9 aa, Artificial Sequence
  Description of Artificial Sequence: Synthetic peptide
VQHCSHSLD

SEQ ID NO: 44295 - protein, 9 aa, Artificial Sequence
  Description of Artificial Sequence: Synthetic peptide
VTYEAKSQW

SEQ ID NO: 44296 - protein, 9 aa, Artificial Sequence
  Description of Artificial Sequence: Synthetic peptide
WDSQPQSGV

SEQ ID NO: 44297 - protein, 9 aa, Artificial Sequence
  Description of Artificial Sequence: Synthetic peptide
WELNNPSVM

SEQ ID NO: 44298 - protein, 9 aa, Artificial Sequence
  Description of Artificial Sequence: Synthetic peptide
WLTWHFSSF

SEQ ID NO: 44299 - protein, 9 aa, Artificial Sequence
  Description of Artificial Sequence: Synthetic peptide
IIATGWECD

SEQ ID NO: 44300 - protein, 9 aa, Artificial Sequence
  Description of Artificial Sequence: Synthetic peptide
ISLPMLECI

SEQ ID NO: 44301 - protein, 9 aa, Artificial Sequence
  Description of Artificial Sequence: Synthetic peptide
LKIYTKCCD

SEQ ID NO: 44302 - protein, 9 aa, Artificial Sequence
  Description of Artificial Sequence: Synthetic peptide
LSSHSEICQ

SEQ ID NO: 44303 - protein, 9 aa, Artificial Sequence
  Description of Artificial Sequence: Synthetic peptide
MCFDIATCA

SEQ ID NO: 44304 - protein, 9 aa, Artificial Sequence
  Description of Artificial Sequence: Synthetic peptide
MEHFLQVCN

SEQ ID NO: 44305 - protein, 9 aa, Artificial Sequence
  Description of Artificial Sequence: Synthetic peptide
MKWPAFACA

SEQ ID NO: 44306 - protein, 9 aa, Artificial Sequence
  Description of Artificial Sequence: Synthetic peptide
MMNVHQNCE

SEQ ID NO: 44307 - protein, 9 aa, Artificial Sequence
  Description of Artificial Sequence: Synthetic peptide
MPVRLTKCS

SEQ ID NO: 44308 - protein, 9 aa, Artificial Sequence
  Description of Artificial Sequence: Synthetic peptide
MWVDCCECH

SEQ ID NO: 44309 - protein, 9 aa, Artificial Sequence
  Description of Artificial Sequence: Synthetic peptide
NGGQKATCP

SEQ ID NO: 44310 - protein, 9 aa, Artificial Sequence
  Description of Artificial Sequence: Synthetic peptide
NGWFVRICG

SEQ ID NO: 44311 - protein, 9 aa, Artificial Sequence
  Description of Artificial Sequence: Synthetic peptide
NNASPSYCG

SEQ ID NO: 44312 - protein, 9 aa, Artificial Sequence
  Description of Artificial Sequence: Synthetic peptide
NRPHQWLCC

SEQ ID NO: 44313 - protein, 9 aa, Artificial Sequence
  Description of Artificial Sequence: Synthetic peptide
NSHACSECS

SEQ ID NO: 44314 - protein, 9 aa, Artificial Sequence
  Description of Artificial Sequence: Synthetic peptide
PNNQCSYCC

SEQ ID NO: 44315 - protein, 9 aa, Artificial Sequence
  Description of Artificial Sequence: Synthetic peptide
PRTEDLQCI

SEQ ID NO: 44316 - protein, 9 aa, Artificial Sequence
  Description of Artificial Sequence: Synthetic peptide
QCMAHIQCD

SEQ ID NO: 44317 - protein, 9 aa, Artificial Sequence
  Description of Artificial Sequence: Synthetic peptide
QEMDGWYCC

SEQ ID NO: 44318 - protein, 9 aa, Artificial Sequence
  Description of Artificial Sequence: Synthetic peptide
QGAIYEVCL

SEQ ID NO: 44319 - protein, 9 aa, Artificial Sequence
  Description of Artificial Sequence: Synthetic peptide
QIFLWFYCG

SEQ ID NO: 44320 - protein, 9 aa, Artificial Sequence
  Description of Artificial Sequence: Synthetic peptide
QKQSTVICE

SEQ ID NO: 44321 - protein, 9 aa, Artificial Sequence
  Description of Artificial Sequence: Synthetic peptide
QLNVTPICC

SEQ ID NO: 44322 - protein, 9 aa, Artificial Sequence
  Description of Artificial Sequence: Synthetic peptide
QMAPYSICQ

SEQ ID NO: 44323 - protein, 9 aa, Artificial Sequence
  Description of Artificial Sequence: Synthetic peptide
QNGNIEKCQ

SEQ ID NO: 44324 - protein, 9 aa, Artificial Sequence
  Description of Artificial Sequence: Synthetic peptide
QQNPNGCCH

SEQ ID NO: 44325 - protein, 9 aa, Artificial Sequence
  Description of Artificial Sequence: Synthetic peptide
QVSSHVECV

SEQ ID NO: 44326 - protein, 9 aa, Artificial Sequence
  Description of Artificial Sequence: Synthetic peptide
RLSAGDACY

SEQ ID NO: 44327 - protein, 9 aa, Artificial Sequence
  Description of Artificial Sequence: Synthetic peptide
RPVLECNCE

SEQ ID NO: 44328 - protein, 9 aa, Artificial Sequence
  Description of Artificial Sequence: Synthetic peptide
RQYIQDVCD

SEQ ID NO: 44329 - protein, 9 aa, Artificial Sequence
  Description of Artificial Sequence: Synthetic peptide
RREPTKCCW

SEQ ID NO: 44330 - protein, 9 aa, Artificial Sequence
  Description of Artificial Sequence: Synthetic peptide
RVTEWFQCG

SEQ ID NO: 44331 - protein, 9 aa, Artificial Sequence
  Description of Artificial Sequence: Synthetic peptide
RWCGKGYCV

SEQ ID NO: 44332 - protein, 9 aa, Artificial Sequence
  Description of Artificial Sequence: Synthetic peptide
SFSYAECCA

SEQ ID NO: 44333 - protein, 9 aa, Artificial Sequence
  Description of Artificial Sequence: Synthetic peptide
SHENQWACI

SEQ ID NO: 44334 - protein, 9 aa, Artificial Sequence
  Description of Artificial Sequence: Synthetic peptide
SHMFQHTCG

SEQ ID NO: 44335 - protein, 9 aa, Artificial Sequence
  Description of Artificial Sequence: Synthetic peptide
SNTLYDTCY

SEQ ID NO: 44336 - protein, 9 aa, Artificial Sequence
  Description of Artificial Sequence: Synthetic peptide
SQFMDDDCA

SEQ ID NO: 44337 - protein, 9 aa, Artificial Sequence
  Description of Artificial Sequence: Synthetic peptide
SRNAMQYCP

SEQ ID NO: 44338 - protein, 9 aa, Artificial Sequence
  Description of Artificial Sequence: Synthetic peptide
SSHIDGICN

SEQ ID NO: 44339 - protein, 9 aa, Artificial Sequence
  Description of Artificial Sequence: Synthetic peptide
TELVYMTCQ

SEQ ID NO: 44340 - protein, 9 aa, Artificial Sequence
  Description of Artificial Sequence: Synthetic peptide
TGDSRMDCQ

SEQ ID NO: 44341 - protein, 9 aa, Artificial Sequence
  Description of Artificial Sequence: Synthetic peptide
TKGFMSVCR

SEQ ID NO: 44342 - protein, 9 aa, Artificial Sequence
  Description of Artificial Sequence: Synthetic peptide
TNYPNWICH

SEQ ID NO: 44343 - protein, 9 aa, Artificial Sequence
  Description of Artificial Sequence: Synthetic peptide
TQEAISDCF

SEQ ID NO: 44344 - protein, 9 aa, Artificial Sequence
  Description of Artificial Sequence: Synthetic peptide
TQQFCHDCQ

SEQ ID NO: 44345 - protein, 9 aa, Artificial Sequence
  Description of Artificial Sequence: Synthetic peptide
TTGMLENCN

SEQ ID NO: 44346 - protein, 9 aa, Artificial Sequence
  Description of Artificial Sequence: Synthetic peptide
TWTQMIDCY

SEQ ID NO: 44347 - protein, 9 aa, Artificial Sequence
  Description of Artificial Sequence: Synthetic peptide
TYVRRWMCL

SEQ ID NO: 44348 - protein, 9 aa, Artificial Sequence
  Description of Artificial Sequence: Synthetic peptide
VIHGSLQCQ

SEQ ID NO: 44349 - protein, 9 aa, Artificial Sequence
  Description of Artificial Sequence: Synthetic peptide
VIMMDGYCT

SEQ ID NO: 44350 - protein, 9 aa, Artificial Sequence
  Description of Artificial Sequence: Synthetic peptide
VIMTQMNCW

SEQ ID NO: 44351 - protein, 9 aa, Artificial Sequence
  Description of Artificial Sequence: Synthetic peptide
VPNTKDACF

SEQ ID NO: 44352 - protein, 9 aa, Artificial Sequence
  Description of Artificial Sequence: Synthetic peptide
VWCGNQWCN

SEQ ID NO: 44353 - protein, 9 aa, Artificial Sequence
  Description of Artificial Sequence: Synthetic peptide
WFTNVLWCG

SEQ ID NO: 44354 - protein, 9 aa, Artificial Sequence
  Description of Artificial Sequence: Synthetic peptide
YPIMERWCH

SEQ ID NO: 44355 - protein, 9 aa, Artificial Sequence
  Description of Artificial Sequence: Synthetic peptide
YSEICDRCI

SEQ ID NO: 44356 - protein, 9 aa, Artificial Sequence
  Description of Artificial Sequence: Synthetic peptide
AFAQLGQCH

SEQ ID NO: 44357 - protein, 9 aa, Artificial Sequence
  Description of Artificial Sequence: Synthetic peptide
ALVLRCICL

SEQ ID NO: 44358 - protein, 9 aa, Artificial Sequence
  Description of Artificial Sequence: Synthetic peptide
CHPDKMECP

SEQ ID NO: 44359 - protein, 9 aa, Artificial Sequence
  Description of Artificial Sequence: Synthetic peptide
CVMVIWLCS

SEQ ID NO: 44360 - protein, 9 aa, Artificial Sequence
  Description of Artificial Sequence: Synthetic peptide
DGSCKWNCH

SEQ ID NO: 44361 - protein, 9 aa, Artificial Sequence
  Description of Artificial Sequence: Synthetic peptide
DSMRKYQCR

SEQ ID NO: 44362 - protein, 9 aa, Artificial Sequence
  Description of Artificial Sequence: Synthetic peptide
DTVMQAACW

SEQ ID NO: 44363 - protein, 9 aa, Artificial Sequence
  Description of Artificial Sequence: Synthetic peptide
GGPHREFCI

SEQ ID NO: 44364 - protein, 9 aa, Artificial Sequence
  Description of Artificial Sequence: Synthetic peptide
HTIDKMNCP

SEQ ID NO: 44365 - protein, 9 aa, Artificial Sequence
  Description of Artificial Sequence: Synthetic peptide
IPYQQDCCA

SEQ ID NO: 44366 - protein, 9 aa, Artificial Sequence
  Description of Artificial Sequence: Synthetic peptide
LILHMLECQ

SEQ ID NO: 44367 - protein, 9 aa, Artificial Sequence
  Description of Artificial Sequence: Synthetic peptide
MHTSMLICC

SEQ ID NO: 44368 - protein, 9 aa, Artificial Sequence
  Description of Artificial Sequence: Synthetic peptide
MKAATMVCL

SEQ ID NO: 44369 - protein, 9 aa, Artificial Sequence
  Description of Artificial Sequence: Synthetic peptide
MKFTLPQCN

SEQ ID NO: 44370 - protein, 9 aa, Artificial Sequence
  Description of Artificial Sequence: Synthetic peptide
NCHRNDACD

SEQ ID NO: 44371 - protein, 9 aa, Artificial Sequence
  Description of Artificial Sequence: Synthetic peptide
NENQMMHCA

SEQ ID NO: 44372 - protein, 9 aa, Artificial Sequence
  Description of Artificial Sequence: Synthetic peptide
NTAQQLCCE

SEQ ID NO: 44373 - protein, 9 aa, Artificial Sequence
  Description of Artificial Sequence: Synthetic peptide
NTTQRALCG

SEQ ID NO: 44374 - protein, 9 aa, Artificial Sequence
  Description of Artificial Sequence: Synthetic peptide
PTRTRRTCR

SEQ ID NO: 44375 - protein, 9 aa, Artificial Sequence
  Description of Artificial Sequence: Synthetic peptide
QINLDSQCM

SEQ ID NO: 44376 - protein, 9 aa, Artificial Sequence
  Description of Artificial Sequence: Synthetic peptide
QSAIEEVCR

SEQ ID NO: 44377 - protein, 9 aa, Artificial Sequence
  Description of Artificial Sequence: Synthetic peptide
QSHPRITCA

SEQ ID NO: 44378 - protein, 9 aa, Artificial Sequence
  Description of Artificial Sequence: Synthetic peptide
QVQMGRDCG

SEQ ID NO: 44379 - protein, 9 aa, Artificial Sequence
  Description of Artificial Sequence: Synthetic peptide
RCITPTGCI

SEQ ID NO: 44380 - protein, 9 aa, Artificial Sequence
  Description of Artificial Sequence: Synthetic peptide
SCCYCPTCC

SEQ ID NO: 44381 - protein, 9 aa, Artificial Sequence
  Description of Artificial Sequence: Synthetic peptide
SMCFKGTCE

SEQ ID NO: 44382 - protein, 9 aa, Artificial Sequence
  Description of Artificial Sequence: Synthetic peptide
SRNANDGCF

SEQ ID NO: 44383 - protein, 9 aa, Artificial Sequence
  Description of Artificial Sequence: Synthetic peptide
SVFMRDECC

SEQ ID NO: 44384 - protein, 9 aa, Artificial Sequence
  Description of Artificial Sequence: Synthetic peptide
TCWQWLKCE

SEQ ID NO: 44385 - protein, 9 aa, Artificial Sequence
  Description of Artificial Sequence: Synthetic peptide
TMDRQPMCI

SEQ ID NO: 44386 - protein, 9 aa, Artificial Sequence
  Description of Artificial Sequence: Synthetic peptide
TSSTEQMCV

SEQ ID NO: 44387 - protein, 9 aa, Artificial Sequence
  Description of Artificial Sequence: Synthetic peptide
IGRITMGDR

SEQ ID NO: 44388 - protein, 9 aa, Artificial Sequence
  Description of Artificial Sequence: Synthetic peptide
IHTLKHDYR

SEQ ID NO: 44389 - protein, 9 aa, Artificial Sequence
  Description of Artificial Sequence: Synthetic peptide
IMFMVAFDR

SEQ ID NO: 44390 - protein, 9 aa, Artificial Sequence
  Description of Artificial Sequence: Synthetic peptide
LHVPPSWAR

SEQ ID NO: 44391 - protein, 9 aa, Artificial Sequence
  Description of Artificial Sequence: Synthetic peptide
LMCTMLTDR

SEQ ID NO: 44392 - protein, 9 aa, Artificial Sequence
  Description of Artificial Sequence: Synthetic peptide
LNMELMHLR

SEQ ID NO: 44393 - protein, 9 aa, Artificial Sequence
  Description of Artificial Sequence: Synthetic peptide
MDFLSCGLR

SEQ ID NO: 44394 - protein, 9 aa, Artificial Sequence
  Description of Artificial Sequence: Synthetic peptide
MELDVSNDR

SEQ ID NO: 44395 - protein, 9 aa, Artificial Sequence
  Description of Artificial Sequence: Synthetic peptide
MFMMMHDIR

SEQ ID NO: 44396 - protein, 9 aa, Artificial Sequence
  Description of Artificial Sequence: Synthetic peptide
MNHWNMHMR

SEQ ID NO: 44397 - protein, 9 aa, Artificial Sequence
  Description of Artificial Sequence: Synthetic peptide
NDPHQHDAR

SEQ ID NO: 44398 - protein, 9 aa, Artificial Sequence
  Description of Artificial Sequence: Synthetic peptide
NFLDCSERR

SEQ ID NO: 44399 - protein, 9 aa, Artificial Sequence
  Description of Artificial Sequence: Synthetic peptide
NPNLIEKHR

SEQ ID NO: 44400 - protein, 9 aa, Artificial Sequence
  Description of Artificial Sequence: Synthetic peptide
QCLLTLQNR

SEQ ID NO: 44401 - protein, 9 aa, Artificial Sequence
  Description of Artificial Sequence: Synthetic peptide
QEHHVFGVR

SEQ ID NO: 44402 - protein, 9 aa, Artificial Sequence
  Description of Artificial Sequence: Synthetic peptide
QITHLQVGR

SEQ ID NO: 44403 - protein, 9 aa, Artificial Sequence
  Description of Artificial Sequence: Synthetic peptide
QSSFNPDMR

SEQ ID NO: 44404 - protein, 9 aa, Artificial Sequence
  Description of Artificial Sequence: Synthetic peptide
QYEVKMWSR

SEQ ID NO: 44405 - protein, 9 aa, Artificial Sequence
  Description of Artificial Sequence: Synthetic peptide
RNDDNLERR

SEQ ID NO: 44406 - protein, 9 aa, Artificial Sequence
  Description of Artificial Sequence: Synthetic peptide
RTFYKQVAR

SEQ ID NO: 44407 - protein, 9 aa, Artificial Sequence
  Description of Artificial Sequence: Synthetic peptide
SCSQIQEIR

SEQ ID NO: 44408 - protein, 9 aa, Artificial Sequence
  Description of Artificial Sequence: Synthetic peptide
SEGCRMPPR

SEQ ID NO: 44409 - protein, 9 aa, Artificial Sequence
  Description of Artificial Sequence: Synthetic peptide
SFAVMMEDR

SEQ ID NO: 44410 - protein, 9 aa, Artificial Sequence
  Description of Artificial Sequence: Synthetic peptide
SPNLIEKHR

SEQ ID NO: 44411 - protein, 9 aa, Artificial Sequence
  Description of Artificial Sequence: Synthetic peptide
SSSSRRDYR

SEQ ID NO: 44412 - protein, 9 aa, Artificial Sequence
  Description of Artificial Sequence: Synthetic peptide
SVYLKLRIR

SEQ ID NO: 44413 - protein, 9 aa, Artificial Sequence
  Description of Artificial Sequence: Synthetic peptide
SYLQWHVTR

SEQ ID NO: 44414 - protein, 9 aa, Artificial Sequence
  Description of Artificial Sequence: Synthetic peptide
TGYFYMAHR

SEQ ID NO: 44415 - protein, 9 aa, Artificial Sequence
  Description of Artificial Sequence: Synthetic peptide
TPAFTHWER

SEQ ID NO: 44416 - protein, 9 aa, Artificial Sequence
  Description of Artificial Sequence: Synthetic peptide
TPMSTQNVR

SEQ ID NO: 44417 - protein, 9 aa, Artificial Sequence
  Description of Artificial Sequence: Synthetic peptide
TTPQYMRER

SEQ ID NO: 44418 - protein, 9 aa, Artificial Sequence
  Description of Artificial Sequence: Synthetic peptide
VNMPLYKFR

SEQ ID NO: 44419 - protein, 9 aa, Artificial Sequence
  Description of Artificial Sequence: Synthetic peptide
WEHHCAEWR

SEQ ID NO: 44420 - protein, 9 aa, Artificial Sequence
  Description of Artificial Sequence: Synthetic peptide
WLPFAMTNR

SEQ ID NO: 44421 - protein, 9 aa, Artificial Sequence
  Description of Artificial Sequence: Synthetic peptide
YCYRAKEQR

SEQ ID NO: 44422 - protein, 9 aa, Artificial Sequence
  Description of Artificial Sequence: Synthetic peptide
YIEPPALGR

SEQ ID NO: 44423 - protein, 9 aa, Artificial Sequence
  Description of Artificial Sequence: Synthetic peptide
YINMNAQER

SEQ ID NO: 44424 - protein, 9 aa, Artificial Sequence
  Description of Artificial Sequence: Synthetic peptide
YKLCRVKGR

SEQ ID NO: 44425 - protein, 9 aa, Artificial Sequence
  Description of Artificial Sequence: Synthetic peptide
YMLVDMIFR

SEQ ID NO: 44426 - protein, 9 aa, Artificial Sequence
  Description of Artificial Sequence: Synthetic peptide
DHAHYWYGR

SEQ ID NO: 44427 - protein, 9 aa, Artificial Sequence
  Description of Artificial Sequence: Synthetic peptide
DSVSQQVER

SEQ ID NO: 44428 - protein, 9 aa, Artificial Sequence
  Description of Artificial Sequence: Synthetic peptide
ECCNYVWER

SEQ ID NO: 44429 - protein, 9 aa, Artificial Sequence
  Description of Artificial Sequence: Synthetic peptide
ESQYSQGTR

SEQ ID NO: 44430 - protein, 9 aa, Artificial Sequence
  Description of Artificial Sequence: Synthetic peptide
FMSMQGDQR

SEQ ID NO: 44431 - protein, 9 aa, Artificial Sequence
  Description of Artificial Sequence: Synthetic peptide
GKNCWPIKR

SEQ ID NO: 44432 - protein, 9 aa, Artificial Sequence
  Description of Artificial Sequence: Synthetic peptide
HTGPMLGDR

SEQ ID NO: 44433 - protein, 9 aa, Artificial Sequence
  Description of Artificial Sequence: Synthetic peptide
HWCTIGKLR

SEQ ID NO: 44434 - protein, 9 aa, Artificial Sequence
  Description of Artificial Sequence: Synthetic peptide
MGADYGVWR

SEQ ID NO: 44435 - protein, 9 aa, Artificial Sequence
  Description of Artificial Sequence: Synthetic peptide
NFNQCTIYR

SEQ ID NO: 44436 - protein, 9 aa, Artificial Sequence
  Description of Artificial Sequence: Synthetic peptide
QKQGTICER

SEQ ID NO: 44437 - protein, 9 aa, Artificial Sequence
  Description of Artificial Sequence: Synthetic peptide
QSAIEEVYR

SEQ ID NO: 44438 - protein, 9 aa, Artificial Sequence
  Description of Artificial Sequence: Synthetic peptide
KAVAGCDFW

SEQ ID NO: 44439 - protein, 9 aa, Artificial Sequence
  Description of Artificial Sequence: Synthetic peptide
KVQSAVEVT

SEQ ID NO: 44440 - protein, 9 aa, Artificial Sequence
  Description of Artificial Sequence: Synthetic peptide
TTKPKQSCM

SEQ ID NO: 44441 - protein, 9 aa, Artificial Sequence
  Description of Artificial Sequence: Synthetic peptide
QATKLQDVA

SEQ ID NO: 44442 - protein, 9 aa, Artificial Sequence
  Description of Artificial Sequence: Synthetic peptide
RARHTEECA

SEQ ID NO: 44443 - protein, 9 aa, Artificial Sequence
  Description of Artificial Sequence: Synthetic peptide
TSHKQSDCT

SEQ ID NO: 44444 - protein, 9 aa, Artificial Sequence
  Description of Artificial Sequence: Synthetic peptide
KSGHTWDMS

SEQ ID NO: 44445 - protein, 9 aa, Artificial Sequence
  Description of Artificial Sequence: Synthetic peptide
RVVTTSNCT

SEQ ID NO: 44446 - protein, 9 aa, Artificial Sequence
  Description of Artificial Sequence: Synthetic peptide
VAFPMKWVC

SEQ ID NO: 44447 - protein, 9 aa, Artificial Sequence
  Description of Artificial Sequence: Synthetic peptide
KDTFTKQWQ

SEQ ID NO: 44448 - protein, 9 aa, Artificial Sequence
  Description of Artificial Sequence: Synthetic peptide
KAQSDCDFY

SEQ ID NO: 44449 - protein, 9 aa, Artificial Sequence
  Description of Artificial Sequence: Synthetic peptide
KAVSSLDGV

SEQ ID NO: 44450 - protein, 9 aa, Artificial Sequence
  Description of Artificial Sequence: Synthetic peptide
LVGRCYDLH

SEQ ID NO: 44451 - protein, 9 aa, Artificial Sequence
  Description of Artificial Sequence: Synthetic peptide
KDGKCVSCG

SEQ ID NO: 44452 - protein, 9 aa, Artificial Sequence
  Description of Artificial Sequence: Synthetic peptide
KCEVKQCDH

SEQ ID NO: 44453 - protein, 9 aa, Artificial Sequence
  Description of Artificial Sequence: Synthetic peptide
SQVIRLACY

SEQ ID NO: 44454 - protein, 9 aa, Artificial Sequence
  Description of Artificial Sequence: Synthetic peptide
ACNVCAHIR

SEQ ID NO: 44455 - protein, 9 aa, Artificial Sequence
  Description of Artificial Sequence: Synthetic peptide
TTYKEMVSG

SEQ ID NO: 44456 - protein, 9 aa, Artificial Sequence
  Description of Artificial Sequence: Synthetic peptide
AAMKLGNLA

SEQ ID NO: 44457 - protein, 9 aa, Artificial Sequence
  Description of Artificial Sequence: Synthetic peptide
GSNRHMIYA

SEQ ID NO: 44458 - protein, 9 aa, Artificial Sequence
  Description of Artificial Sequence: Synthetic peptide
AISKFIEGM

SEQ ID NO: 44459 - protein, 9 aa, Artificial Sequence
  Description of Artificial Sequence: Synthetic peptide
ECGRLYEHE

SEQ ID NO: 44460 - protein, 9 aa, Artificial Sequence
  Description of Artificial Sequence: Synthetic peptide
KADQFSRDR

SEQ ID NO: 44461 - protein, 9 aa, Artificial Sequence
  Description of Artificial Sequence: Synthetic peptide
AAYKAQVLR

SEQ ID NO: 44462 - protein, 9 aa, Artificial Sequence
  Description of Artificial Sequence: Synthetic peptide
ASWLDMCMR

SEQ ID NO: 44463 - protein, 9 aa, Artificial Sequence
  Description of Artificial Sequence: Synthetic peptide
KYEHTTSPG

SEQ ID NO: 44464 - protein, 9 aa, Artificial Sequence
  Description of Artificial Sequence: Synthetic peptide
QGLKCEQFE

SEQ ID NO: 44465 - protein, 9 aa, Artificial Sequence
  Description of Artificial Sequence: Synthetic peptide
TKNTIVKAE

SEQ ID NO: 44466 - protein, 9 aa, Artificial Sequence
  Description of Artificial Sequence: Synthetic peptide
RSNLLLQHM

SEQ ID NO: 44467 - protein, 9 aa, Artificial Sequence
  Description of Artificial Sequence: Synthetic peptide
EKRMRAECE

SEQ ID NO: 44468 - protein, 9 aa, Artificial Sequence
  Description of Artificial Sequence: Synthetic peptide
AIKMTNRCR

SEQ ID NO: 44469 - protein, 9 aa, Artificial Sequence
  Description of Artificial Sequence: Synthetic peptide
TMAKYNEME

SEQ ID NO: 44470 - protein, 9 aa, Artificial Sequence
  Description of Artificial Sequence: Synthetic peptide
RAERWGGCV

SEQ ID NO: 44471 - protein, 9 aa, Artificial Sequence
  Description of Artificial Sequence: Synthetic peptide
NAKLEHAVN

SEQ ID NO: 44472 - protein, 9 aa, Artificial Sequence
  Description of Artificial Sequence: Synthetic peptide
IMTKVHHVT

SEQ ID NO: 44473 - protein, 9 aa, Artificial Sequence
  Description of Artificial Sequence: Synthetic peptide
QKRHCQTCT

SEQ ID NO: 44474 - protein, 9 aa, Artificial Sequence
  Description of Artificial Sequence: Synthetic peptide
TKRDCNTQI

SEQ ID NO: 44475 - protein, 9 aa, Artificial Sequence
  Description of Artificial Sequence: Synthetic peptide
RGEQKVYCS

SEQ ID NO: 44476 - protein, 9 aa, Artificial Sequence
  Description of Artificial Sequence: Synthetic peptide
SRRLTTAHY

SEQ ID NO: 44477 - protein, 9 aa, Artificial Sequence
  Description of Artificial Sequence: Synthetic peptide
SKKLTQQHM

SEQ ID NO: 44478 - protein, 9 aa, Artificial Sequence
  Description of Artificial Sequence: Synthetic peptide
MGFRTSQYV

SEQ ID NO: 44479 - protein, 9 aa, Artificial Sequence
  Description of Artificial Sequence: Synthetic peptide
AASRGNDCN

SEQ ID NO: 44480 - protein, 9 aa, Artificial Sequence
  Description of Artificial Sequence: Synthetic peptide
KYETENGIN

SEQ ID NO: 44481 - protein, 9 aa, Artificial Sequence
  Description of Artificial Sequence: Synthetic peptide
KAKLETWWD

SEQ ID NO: 44482 - protein, 9 aa, Artificial Sequence
  Description of Artificial Sequence: Synthetic peptide
GMTKNTMGH

SEQ ID NO: 44483 - protein, 9 aa, Artificial Sequence
  Description of Artificial Sequence: Synthetic peptide
ARSFVEKCR

SEQ ID NO: 44484 - protein, 9 aa, Artificial Sequence
  Description of Artificial Sequence: Synthetic peptide
FGKYFWNSF

SEQ ID NO: 44485 - protein, 9 aa, Artificial Sequence
  Description of Artificial Sequence: Synthetic peptide
VMVKWMRCN

SEQ ID NO: 44486 - protein, 9 aa, Artificial Sequence
  Description of Artificial Sequence: Synthetic peptide
IVHKCIDIG

SEQ ID NO: 44487 - protein, 9 aa, Artificial Sequence
  Description of Artificial Sequence: Synthetic peptide
VRQMNLLCR

SEQ ID NO: 44488 - protein, 9 aa, Artificial Sequence
  Description of Artificial Sequence: Synthetic peptide
KAQYGFAVP

SEQ ID NO: 44489 - protein, 9 aa, Artificial Sequence
  Description of Artificial Sequence: Synthetic peptide
KSEFVQSNF

SEQ ID NO: 44490 - protein, 9 aa, Artificial Sequence
  Description of Artificial Sequence: Synthetic peptide
FTKIHWWFT

SEQ ID NO: 44491 - protein, 9 aa, Artificial Sequence
  Description of Artificial Sequence: Synthetic peptide
TKMQVTSST

SEQ ID NO: 44492 - protein, 9 aa, Artificial Sequence
  Description of Artificial Sequence: Synthetic peptide
MRATSHIVS

SEQ ID NO: 44493 - protein, 9 aa, Artificial Sequence
  Description of Artificial Sequence: Synthetic peptide
KSTFAVLWA

SEQ ID NO: 44494 - protein, 9 aa, Artificial Sequence
  Description of Artificial Sequence: Synthetic peptide
GATFCWNCG

SEQ ID NO: 44495 - protein, 9 aa, Artificial Sequence
  Description of Artificial Sequence: Synthetic peptide
VKTQYCDMD

SEQ ID NO: 44496 - protein, 9 aa, Artificial Sequence
  Description of Artificial Sequence: Synthetic peptide
KVGPAADFA

SEQ ID NO: 44497 - protein, 9 aa, Artificial Sequence
  Description of Artificial Sequence: Synthetic peptide
AASFHAMDR

SEQ ID NO: 44498 - protein, 9 aa, Artificial Sequence
  Description of Artificial Sequence: Synthetic peptide
EKVMRKPAD

SEQ ID NO: 44499 - protein, 9 aa, Artificial Sequence
  Description of Artificial Sequence: Synthetic peptide
KVTIGTLAN

SEQ ID NO: 44500 - protein, 9 aa, Artificial Sequence
  Description of Artificial Sequence: Synthetic peptide
AKMNYANVD

SEQ ID NO: 44501 - protein, 9 aa, Artificial Sequence
  Description of Artificial Sequence: Synthetic peptide
SKQVCLAHE

SEQ ID NO: 44502 - protein, 9 aa, Artificial Sequence
  Description of Artificial Sequence: Synthetic peptide
VAKMSFDCC

SEQ ID NO: 44503 - protein, 9 aa, Artificial Sequence
  Description of Artificial Sequence: Synthetic peptide
RPSYKVKCQ

SEQ ID NO: 44504 - protein, 9 aa, Artificial Sequence
  Description of Artificial Sequence: Synthetic peptide
ATHKIIGVE

SEQ ID NO: 44505 - protein, 9 aa, Artificial Sequence
  Description of Artificial Sequence: Synthetic peptide
KSMHTVNEP

SEQ ID NO: 44506 - protein, 9 aa, Artificial Sequence
  Description of Artificial Sequence: Synthetic peptide
VCARTNNLC

SEQ ID NO: 44507 - protein, 9 aa, Artificial Sequence
  Description of Artificial Sequence: Synthetic peptide
TKVIYEKAV

SEQ ID NO: 44508 - protein, 9 aa, Artificial Sequence
  Description of Artificial Sequence: Synthetic peptide
RSGVTYAWA

SEQ ID NO: 44509 - protein, 9 aa, Artificial Sequence
  Description of Artificial Sequence: Synthetic peptide
RTQTFTMIP

SEQ ID NO: 44510 - protein, 9 aa, Artificial Sequence
  Description of Artificial Sequence: Synthetic peptide
KCEMNISCH

SEQ ID NO: 44511 - protein, 9 aa, Artificial Sequence
  Description of Artificial Sequence: Synthetic peptide
KPLQAFAFN

SEQ ID NO: 44512 - protein, 9 aa, Artificial Sequence
  Description of Artificial Sequence: Synthetic peptide
AELRYQFYM

SEQ ID NO: 44513 - protein, 9 aa, Artificial Sequence
  Description of Artificial Sequence: Synthetic peptide
DKRVIVKCE

SEQ ID NO: 44514 - protein, 9 aa, Artificial Sequence
  Description of Artificial Sequence: Synthetic peptide
SNCLLGQCT

SEQ ID NO: 44515 - protein, 9 aa, Artificial Sequence
  Description of Artificial Sequence: Synthetic peptide
QKQGFAINQ

SEQ ID NO: 44516 - protein, 9 aa, Artificial Sequence
  Description of Artificial Sequence: Synthetic peptide
SKLLYSTSG

SEQ ID NO: 44517 - protein, 9 aa, Artificial Sequence
  Description of Artificial Sequence: Synthetic peptide
KITFCWPCH

SEQ ID NO: 44518 - protein, 9 aa, Artificial Sequence
  Description of Artificial Sequence: Synthetic peptide
RMQYTQSCS

SEQ ID NO: 44519 - protein, 9 aa, Artificial Sequence
  Description of Artificial Sequence: Synthetic peptide
GTRTSFAMD

SEQ ID NO: 44520 - protein, 9 aa, Artificial Sequence
  Description of Artificial Sequence: Synthetic peptide
VVKQTTGMD

SEQ ID NO: 44521 - protein, 9 aa, Artificial Sequence
  Description of Artificial Sequence: Synthetic peptide
SATRAFEVQ

SEQ ID NO: 44522 - protein, 9 aa, Artificial Sequence
  Description of Artificial Sequence: Synthetic peptide
SNGLQNIAF

SEQ ID NO: 44523 - protein, 9 aa, Artificial Sequence
  Description of Artificial Sequence: Synthetic peptide
KMQSRLYCY

SEQ ID NO: 44524 - protein, 9 aa, Artificial Sequence
  Description of Artificial Sequence: Synthetic peptide
TIKPSWLCA

SEQ ID NO: 44525 - protein, 9 aa, Artificial Sequence
  Description of Artificial Sequence: Synthetic peptide
VSVRMHEMH

SEQ ID NO: 44526 - protein, 9 aa, Artificial Sequence
  Description of Artificial Sequence: Synthetic peptide
KAMMDHAYD

SEQ ID NO: 44527 - protein, 9 aa, Artificial Sequence
  Description of Artificial Sequence: Synthetic peptide
LASRAENHS

SEQ ID NO: 44528 - protein, 9 aa, Artificial Sequence
  Description of Artificial Sequence: Synthetic peptide
KMQVDNANE

SEQ ID NO: 44529 - protein, 9 aa, Artificial Sequence
  Description of Artificial Sequence: Synthetic peptide
MCMKAQRSG

SEQ ID NO: 44530 - protein, 9 aa, Artificial Sequence
  Description of Artificial Sequence: Synthetic peptide
TAMTDVRDR

SEQ ID NO: 44531 - protein, 9 aa, Artificial Sequence
  Description of Artificial Sequence: Synthetic peptide
RINRNNCRI

SEQ ID NO: 44532 - protein, 9 aa, Artificial Sequence
  Description of Artificial Sequence: Synthetic peptide
MAQLLYSCQ

SEQ ID NO: 44533 - protein, 9 aa, Artificial Sequence
  Description of Artificial Sequence: Synthetic peptide
QCRRMEGVE

SEQ ID NO: 44534 - protein, 9 aa, Artificial Sequence
  Description of Artificial Sequence: Synthetic peptide
AMQRALINA

SEQ ID NO: 44535 - protein, 9 aa, Artificial Sequence
  Description of Artificial Sequence: Synthetic peptide
DRKTQMIST

SEQ ID NO: 44536 - protein, 9 aa, Artificial Sequence
  Description of Artificial Sequence: Synthetic peptide
NGFIQYDSK

SEQ ID NO: 44537 - protein, 9 aa, Artificial Sequence
  Description of Artificial Sequence: Synthetic peptide
SKNAANSWD

SEQ ID NO: 44538 - protein, 9 aa, Artificial Sequence
  Description of Artificial Sequence: Synthetic peptide
QKKFMECAQ

SEQ ID NO: 44539 - protein, 9 aa, Artificial Sequence
  Description of Artificial Sequence: Synthetic peptide
SLFLEKSCG

SEQ ID NO: 44540 - protein, 9 aa, Artificial Sequence
  Description of Artificial Sequence: Synthetic peptide
KVLECHGAA

SEQ ID NO: 44541 - protein, 9 aa, Artificial Sequence
  Description of Artificial Sequence: Synthetic peptide
KIESTSSHC

SEQ ID NO: 44542 - protein, 9 aa, Artificial Sequence
  Description of Artificial Sequence: Synthetic peptide
KHQFTGLHS

SEQ ID NO: 44543 - protein, 9 aa, Artificial Sequence
  Description of Artificial Sequence: Synthetic peptide
QRKMNPDCM

SEQ ID NO: 44544 - protein, 9 aa, Artificial Sequence
  Description of Artificial Sequence: Synthetic peptide
KMSTCMEHN

SEQ ID NO: 44545 - protein, 9 aa, Artificial Sequence
  Description of Artificial Sequence: Synthetic peptide
AIGRNDQTT

SEQ ID NO: 44546 - protein, 9 aa, Artificial Sequence
  Description of Artificial Sequence: Synthetic peptide
NAVVMMSNK

SEQ ID NO: 44547 - protein, 9 aa, Artificial Sequence
  Description of Artificial Sequence: Synthetic peptide
RNIQGISWA

SEQ ID NO: 44548 - protein, 9 aa, Artificial Sequence
  Description of Artificial Sequence: Synthetic peptide
AKSPITNGM

SEQ ID NO: 44549 - protein, 9 aa, Artificial Sequence
  Description of Artificial Sequence: Synthetic peptide
SSNRYGDVT

SEQ ID NO: 44550 - protein, 9 aa, Artificial Sequence
  Description of Artificial Sequence: Synthetic peptide
MRSGFQMST

SEQ ID NO: 44551 - protein, 9 aa, Artificial Sequence
  Description of Artificial Sequence: Synthetic peptide
IAAEFKACR

SEQ ID NO: 44552 - protein, 9 aa, Artificial Sequence
  Description of Artificial Sequence: Synthetic peptide
KLNSTMYVG

SEQ ID NO: 44553 - protein, 9 aa, Artificial Sequence
  Description of Artificial Sequence: Synthetic peptide
LAVRTKQFH

SEQ ID NO: 44554 - protein, 9 aa, Artificial Sequence
  Description of Artificial Sequence: Synthetic peptide
KQTSPLHIG

SEQ ID NO: 44555 - protein, 9 aa, Artificial Sequence
  Description of Artificial Sequence: Synthetic peptide
KVANFFDEP

SEQ ID NO: 44556 - protein, 9 aa, Artificial Sequence
  Description of Artificial Sequence: Synthetic peptide
TKQHFPLGE

SEQ ID NO: 44557 - protein, 9 aa, Artificial Sequence
  Description of Artificial Sequence: Synthetic peptide
MIVKIERGV

SEQ ID NO: 44558 - protein, 9 aa, Artificial Sequence
  Description of Artificial Sequence: Synthetic peptide
ACSKLTCCY

SEQ ID NO: 44559 - protein, 9 aa, Artificial Sequence
  Description of Artificial Sequence: Synthetic peptide
LMYKMHQIL

SEQ ID NO: 44560 - protein, 9 aa, Artificial Sequence
  Description of Artificial Sequence: Synthetic peptide
TAGKTWEGK

SEQ ID NO: 44561 - protein, 9 aa, Artificial Sequence
  Description of Artificial Sequence: Synthetic peptide
KFHNSIVVT

SEQ ID NO: 44562 - protein, 9 aa, Artificial Sequence
  Description of Artificial Sequence: Synthetic peptide
AACRISEVP

SEQ ID NO: 44563 - protein, 9 aa, Artificial Sequence
  Description of Artificial Sequence: Synthetic peptide
ISTKAHQME

SEQ ID NO: 44564 - protein, 9 aa, Artificial Sequence
  Description of Artificial Sequence: Synthetic peptide
SQKSHTVWA

SEQ ID NO: 44565 - protein, 9 aa, Artificial Sequence
  Description of Artificial Sequence: Synthetic peptide
VKFLVQCHD

SEQ ID NO: 44566 - protein, 9 aa, Artificial Sequence
  Description of Artificial Sequence: Synthetic peptide
SVTIWENFV

SEQ ID NO: 44567 - protein, 9 aa, Artificial Sequence
  Description of Artificial Sequence: Synthetic peptide
KANPSNGFQ

SEQ ID NO: 44568 - protein, 9 aa, Artificial Sequence
  Description of Artificial Sequence: Synthetic peptide
TTGWQVQCM

SEQ ID NO: 44569 - protein, 9 aa, Artificial Sequence
  Description of Artificial Sequence: Synthetic peptide
SYVFAQIGC

SEQ ID NO: 44570 - protein, 9 aa, Artificial Sequence
  Description of Artificial Sequence: Synthetic peptide
ATRQLFDCR

SEQ ID NO: 44571 - protein, 9 aa, Artificial Sequence
  Description of Artificial Sequence: Synthetic peptide
GTHRTEMGR

SEQ ID NO: 44572 - protein, 9 aa, Artificial Sequence
  Description of Artificial Sequence: Synthetic peptide
AQNRIGNQN

SEQ ID NO: 44573 - protein, 9 aa, Artificial Sequence
  Description of Artificial Sequence: Synthetic peptide
MSNTAVQFV

SEQ ID NO: 44574 - protein, 9 aa, Artificial Sequence
  Description of Artificial Sequence: Synthetic peptide
QKASYVEFD

SEQ ID NO: 44575 - protein, 9 aa, Artificial Sequence
  Description of Artificial Sequence: Synthetic peptide
FGMKSKQMS

SEQ ID NO: 44576 - protein, 9 aa, Artificial Sequence
  Description of Artificial Sequence: Synthetic peptide
IQREVTWCT

SEQ ID NO: 44577 - protein, 9 aa, Artificial Sequence
  Description of Artificial Sequence: Synthetic peptide
NVNREHRFA

SEQ ID NO: 44578 - protein, 9 aa, Artificial Sequence
  Description of Artificial Sequence: Synthetic peptide
MDRLLIKMA

SEQ ID NO: 44579 - protein, 9 aa, Artificial Sequence
  Description of Artificial Sequence: Synthetic peptide
TRFMTDCMF

SEQ ID NO: 44580 - protein, 9 aa, Artificial Sequence
  Description of Artificial Sequence: Synthetic peptide
VKGQMYSCE

SEQ ID NO: 44581 - protein, 9 aa, Artificial Sequence
  Description of Artificial Sequence: Synthetic peptide
KCEEQKPCP

SEQ ID NO: 44582 - protein, 9 aa, Artificial Sequence
  Description of Artificial Sequence: Synthetic peptide
VCLQFYQGR

SEQ ID NO: 44583 - protein, 9 aa, Artificial Sequence
  Description of Artificial Sequence: Synthetic peptide
MTRASHVMC

SEQ ID NO: 44584 - protein, 9 aa, Artificial Sequence
  Description of Artificial Sequence: Synthetic peptide
RADQQVRWA

SEQ ID NO: 44585 - protein, 9 aa, Artificial Sequence
  Description of Artificial Sequence: Synthetic peptide
RADRCSDLY

SEQ ID NO: 44586 - protein, 9 aa, Artificial Sequence
  Description of Artificial Sequence: Synthetic peptide
TSVTIVECV

SEQ ID NO: 44587 - protein, 9 aa, Artificial Sequence
  Description of Artificial Sequence: Synthetic peptide
SNRTCAVSV

SEQ ID NO: 44588 - protein, 9 aa, Artificial Sequence
  Description of Artificial Sequence: Synthetic peptide
VRTYVQACE

SEQ ID NO: 44589 - protein, 9 aa, Artificial Sequence
  Description of Artificial Sequence: Synthetic peptide
ALMKLWCAM

SEQ ID NO: 44590 - protein, 9 aa, Artificial Sequence
  Description of Artificial Sequence: Synthetic peptide
QKNPTLDSA

SEQ ID NO: 44591 - protein, 9 aa, Artificial Sequence
  Description of Artificial Sequence: Synthetic peptide
SMRRNKYWC

SEQ ID NO: 44592 - protein, 9 aa, Artificial Sequence
  Description of Artificial Sequence: Synthetic peptide
TKAEHVVMH

SEQ ID NO: 44593 - protein, 9 aa, Artificial Sequence
  Description of Artificial Sequence: Synthetic peptide
VAVKHHTTC

SEQ ID NO: 44594 - protein, 9 aa, Artificial Sequence
  Description of Artificial Sequence: Synthetic peptide
FCKTSTSFN

SEQ ID NO: 44595 - protein, 9 aa, Artificial Sequence
  Description of Artificial Sequence: Synthetic peptide
SANLLSDFH

SEQ ID NO: 44596 - protein, 9 aa, Artificial Sequence
  Description of Artificial Sequence: Synthetic peptide
KSVMDDVVD

SEQ ID NO: 44597 - protein, 9 aa, Artificial Sequence
  Description of Artificial Sequence: Synthetic peptide
KGETTQNYG

SEQ ID NO: 44598 - protein, 9 aa, Artificial Sequence
  Description of Artificial Sequence: Synthetic peptide
KAMDGAALT

SEQ ID NO: 44599 - protein, 9 aa, Artificial Sequence
  Description of Artificial Sequence: Synthetic peptide
KMEVRMDHG

SEQ ID NO: 44600 - protein, 9 aa, Artificial Sequence
  Description of Artificial Sequence: Synthetic peptide
TKTTTNISI

SEQ ID NO: 44601 - protein, 9 aa, Artificial Sequence
  Description of Artificial Sequence: Synthetic peptide
TIAREKGYP

SEQ ID NO: 44602 - protein, 9 aa, Artificial Sequence
  Description of Artificial Sequence: Synthetic peptide
AIKPSTWQQ

SEQ ID NO: 44603 - protein, 9 aa, Artificial Sequence
  Description of Artificial Sequence: Synthetic peptide
MKFLLELWS

SEQ ID NO: 44604 - protein, 9 aa, Artificial Sequence
  Description of Artificial Sequence: Synthetic peptide
KGMMKDTEQ

SEQ ID NO: 44605 - protein, 9 aa, Artificial Sequence
  Description of Artificial Sequence: Synthetic peptide
IMKPFMEMW

SEQ ID NO: 44606 - protein, 9 aa, Artificial Sequence
  Description of Artificial Sequence: Synthetic peptide
ACVTCTTFK

SEQ ID NO: 44607 - protein, 9 aa, Artificial Sequence
  Description of Artificial Sequence: Synthetic peptide
AMKSRCRCE

SEQ ID NO: 44608 - protein, 9 aa, Artificial Sequence
  Description of Artificial Sequence: Synthetic peptide
MCKFSVWAL

SEQ ID NO: 44609 - protein, 9 aa, Artificial Sequence
  Description of Artificial Sequence: Synthetic peptide
YNKAYGYMA

SEQ ID NO: 44610 - protein, 9 aa, Artificial Sequence
  Description of Artificial Sequence: Synthetic peptide
QRAHYIDCD

SEQ ID NO: 44611 - protein, 9 aa, Artificial Sequence
  Description of Artificial Sequence: Synthetic peptide
LAAVWVVDG

SEQ ID NO: 44612 - protein, 9 aa, Artificial Sequence
  Description of Artificial Sequence: Synthetic peptide
MAHGFQRWC

SEQ ID NO: 44613 - protein, 9 aa, Artificial Sequence
  Description of Artificial Sequence: Synthetic peptide
STKIQYFCE

SEQ ID NO: 44614 - protein, 9 aa, Artificial Sequence
  Description of Artificial Sequence: Synthetic peptide
EYVAWMKQW

SEQ ID NO: 44615 - protein, 9 aa, Artificial Sequence
  Description of Artificial Sequence: Synthetic peptide
KSVQKECYF

SEQ ID NO: 44616 - protein, 9 aa, Artificial Sequence
  Description of Artificial Sequence: Synthetic peptide
MCAQWCQCN

SEQ ID NO: 44617 - protein, 9 aa, Artificial Sequence
  Description of Artificial Sequence: Synthetic peptide
RAEAHWHNF

SEQ ID NO: 44618 - protein, 9 aa, Artificial Sequence
  Description of Artificial Sequence: Synthetic peptide
NKLIQEGCP

SEQ ID NO: 44619 - protein, 9 aa, Artificial Sequence
  Description of Artificial Sequence: Synthetic peptide
EKAGSGAWN

SEQ ID NO: 44620 - protein, 9 aa, Artificial Sequence
  Description of Artificial Sequence: Synthetic peptide
SAGMKPMCC

SEQ ID NO: 44621 - protein, 9 aa, Artificial Sequence
  Description of Artificial Sequence: Synthetic peptide
RKSQKRMIN

SEQ ID NO: 44622 - protein, 9 aa, Artificial Sequence
  Description of Artificial Sequence: Synthetic peptide
SAAIDRLQR

SEQ ID NO: 44623 - protein, 9 aa, Artificial Sequence
  Description of Artificial Sequence: Synthetic peptide
AQAYYGVCD

SEQ ID NO: 44624 - protein, 9 aa, Artificial Sequence
  Description of Artificial Sequence: Synthetic peptide
MAMRVGSHQ

SEQ ID NO: 44625 - protein, 9 aa, Artificial Sequence
  Description of Artificial Sequence: Synthetic peptide
QKTPTMNEW

SEQ ID NO: 44626 - protein, 9 aa, Artificial Sequence
  Description of Artificial Sequence: Synthetic peptide
NCTMIQRNY

SEQ ID NO: 44627 - protein, 9 aa, Artificial Sequence
  Description of Artificial Sequence: Synthetic peptide
KCNSQPSSD

SEQ ID NO: 44628 - protein, 9 aa, Artificial Sequence
  Description of Artificial Sequence: Synthetic peptide
IKQPYALTA

SEQ ID NO: 44629 - protein, 9 aa, Artificial Sequence
  Description of Artificial Sequence: Synthetic peptide
GQQLIARCG

SEQ ID NO: 44630 - protein, 9 aa, Artificial Sequence
  Description of Artificial Sequence: Synthetic peptide
EERPWYCKE

SEQ ID NO: 44631 - protein, 9 aa, Artificial Sequence
  Description of Artificial Sequence: Synthetic peptide
NRELRMHHE

SEQ ID NO: 44632 - protein, 9 aa, Artificial Sequence
  Description of Artificial Sequence: Synthetic peptide
TEQIFMKGC

SEQ ID NO: 44633 - protein, 9 aa, Artificial Sequence
  Description of Artificial Sequence: Synthetic peptide
QKRLGEEVE

SEQ ID NO: 44634 - protein, 9 aa, Artificial Sequence
  Description of Artificial Sequence: Synthetic peptide
TTYKAMSGD

SEQ ID NO: 44635 - protein, 9 aa, Artificial Sequence
  Description of Artificial Sequence: Synthetic peptide
SHMFQYSHT

SEQ ID NO: 44636 - protein, 9 aa, Artificial Sequence
  Description of Artificial Sequence: Synthetic peptide
TLKVHGIGG

SEQ ID NO: 44637 - protein, 9 aa, Artificial Sequence
  Description of Artificial Sequence: Synthetic peptide
KIQQNMETL

SEQ ID NO: 44638 - protein, 9 aa, Artificial Sequence
  Description of Artificial Sequence: Synthetic peptide
KAMQPECGA

SEQ ID NO: 44639 - protein, 9 aa, Artificial Sequence
  Description of Artificial Sequence: Synthetic peptide
ASYRMGDHP

SEQ ID NO: 44640 - protein, 9 aa, Artificial Sequence
  Description of Artificial Sequence: Synthetic peptide
AFAKLIHTE

SEQ ID NO: 44641 - protein, 9 aa, Artificial Sequence
  Description of Artificial Sequence: Synthetic peptide
KAEPNMALE

SEQ ID NO: 44642 - protein, 9 aa, Artificial Sequence
  Description of Artificial Sequence: Synthetic peptide
FRKSYWYTG

SEQ ID NO: 44643 - protein, 9 aa, Artificial Sequence
  Description of Artificial Sequence: Synthetic peptide
MGGGQASWY

SEQ ID NO: 44644 - protein, 9 aa, Artificial Sequence
  Description of Artificial Sequence: Synthetic peptide
VLHKAEICL

SEQ ID NO: 44645 - protein, 9 aa, Artificial Sequence
  Description of Artificial Sequence: Synthetic peptide
YCTQCRGGV

SEQ ID NO: 44646 - protein, 9 aa, Artificial Sequence
  Description of Artificial Sequence: Synthetic peptide
MCSQCAVLD

SEQ ID NO: 44647 - protein, 9 aa, Artificial Sequence
  Description of Artificial Sequence: Synthetic peptide
RVNTSSRAT

SEQ ID NO: 44648 - protein, 9 aa, Artificial Sequence
  Description of Artificial Sequence: Synthetic peptide
IRYAYDGNE

SEQ ID NO: 44649 - protein, 9 aa, Artificial Sequence
  Description of Artificial Sequence: Synthetic peptide
VATQLIHSY

SEQ ID NO: 44650 - protein, 9 aa, Artificial Sequence
  Description of Artificial Sequence: Synthetic peptide
IWKQLVEMQ

SEQ ID NO: 44651 - protein, 9 aa, Artificial Sequence
  Description of Artificial Sequence: Synthetic peptide
KGGTENGWN

SEQ ID NO: 44652 - protein, 9 aa, Artificial Sequence
  Description of Artificial Sequence: Synthetic peptide
MSQRIWTVG

SEQ ID NO: 44653 - protein, 9 aa, Artificial Sequence
  Description of Artificial Sequence: Synthetic peptide
NKQMFCKGP

SEQ ID NO: 44654 - protein, 9 aa, Artificial Sequence
  Description of Artificial Sequence: Synthetic peptide
MTYRSEFMR

SEQ ID NO: 44655 - protein, 9 aa, Artificial Sequence
  Description of Artificial Sequence: Synthetic peptide
APGKGNRAC

SEQ ID NO: 44656 - protein, 9 aa, Artificial Sequence
  Description of Artificial Sequence: Synthetic peptide
MFTRFMRCG

SEQ ID NO: 44657 - protein, 9 aa, Artificial Sequence
  Description of Artificial Sequence: Synthetic peptide
RCMQSFTFH

SEQ ID NO: 44658 - protein, 9 aa, Artificial Sequence
  Description of Artificial Sequence: Synthetic peptide
TIFRLRKSC

SEQ ID NO: 44659 - protein, 9 aa, Artificial Sequence
  Description of Artificial Sequence: Synthetic peptide
MMSSQMKCG

SEQ ID NO: 44660 - protein, 9 aa, Artificial Sequence
  Description of Artificial Sequence: Synthetic peptide
HTARNVRMR

SEQ ID NO: 44661 - protein, 9 aa, Artificial Sequence
  Description of Artificial Sequence: Synthetic peptide
TGKSWTMLG

SEQ ID NO: 44662 - protein, 9 aa, Artificial Sequence
  Description of Artificial Sequence: Synthetic peptide
EAAKESRLA

SEQ ID NO: 44663 - protein, 9 aa, Artificial Sequence
  Description of Artificial Sequence: Synthetic peptide
GVKLQSYMT

SEQ ID NO: 44664 - protein, 9 aa, Artificial Sequence
  Description of Artificial Sequence: Synthetic peptide
DRRYFTYAG

SEQ ID NO: 44665 - protein, 9 aa, Artificial Sequence
  Description of Artificial Sequence: Synthetic peptide
LCYMLFEMT

SEQ ID NO: 44666 - protein, 9 aa, Artificial Sequence
  Description of Artificial Sequence: Synthetic peptide
TIKCWNWSN

SEQ ID NO: 44667 - protein, 9 aa, Artificial Sequence
  Description of Artificial Sequence: Synthetic peptide
STGMWQCAQ

SEQ ID NO: 44668 - protein, 9 aa, Artificial Sequence
  Description of Artificial Sequence: Synthetic peptide
KLTECPLCG

SEQ ID NO: 44669 - protein, 9 aa, Artificial Sequence
  Description of Artificial Sequence: Synthetic peptide
KTFFYHAPC

SEQ ID NO: 44670 - protein, 9 aa, Artificial Sequence
  Description of Artificial Sequence: Synthetic peptide
RISDAYQCP

SEQ ID NO: 44671 - protein, 9 aa, Artificial Sequence
  Description of Artificial Sequence: Synthetic peptide
SSKYAHYCA

SEQ ID NO: 44672 - protein, 9 aa, Artificial Sequence
  Description of Artificial Sequence: Synthetic peptide
IATVWARCP

SEQ ID NO: 44673 - protein, 9 aa, Artificial Sequence
  Description of Artificial Sequence: Synthetic peptide
TIGRTQFCH

SEQ ID NO: 44674 - protein, 9 aa, Artificial Sequence
  Description of Artificial Sequence: Synthetic peptide
SSHMEFSAK

SEQ ID NO: 44675 - protein, 9 aa, Artificial Sequence
  Description of Artificial Sequence: Synthetic peptide
MIQRVPTVA

SEQ ID NO: 44676 - protein, 9 aa, Artificial Sequence
  Description of Artificial Sequence: Synthetic peptide
SKTDKMEFY

SEQ ID NO: 44677 - protein, 9 aa, Artificial Sequence
  Description of Artificial Sequence: Synthetic peptide
TTAIRMYCV

SEQ ID NO: 44678 - protein, 9 aa, Artificial Sequence
  Description of Artificial Sequence: Synthetic peptide
KCQYCSDMY

SEQ ID NO: 44679 - protein, 9 aa, Artificial Sequence
  Description of Artificial Sequence: Synthetic peptide
TCKPIYHIE

SEQ ID NO: 44680 - protein, 9 aa, Artificial Sequence
  Description of Artificial Sequence: Synthetic peptide
RVNRKQINI

SEQ ID NO: 44681 - protein, 9 aa, Artificial Sequence
  Description of Artificial Sequence: Synthetic peptide
SGGKSQIVP

SEQ ID NO: 44682 - protein, 9 aa, Artificial Sequence
  Description of Artificial Sequence: Synthetic peptide
MFRINTECC

SEQ ID NO: 44683 - protein, 9 aa, Artificial Sequence
  Description of Artificial Sequence: Synthetic peptide
NAATIYREA

SEQ ID NO: 44684 - protein, 9 aa, Artificial Sequence
  Description of Artificial Sequence: Synthetic peptide
ASTKQEYWR

SEQ ID NO: 44685 - protein, 9 aa, Artificial Sequence
  Description of Artificial Sequence: Synthetic peptide
TSALKPACN

SEQ ID NO: 44686 - protein, 9 aa, Artificial Sequence
  Description of Artificial Sequence: Synthetic peptide
TVNLNGESR

SEQ ID NO: 44687 - protein, 9 aa, Artificial Sequence
  Description of Artificial Sequence: Synthetic peptide
SGTFAPFGW

SEQ ID NO: 44688 - protein, 9 aa, Artificial Sequence
  Description of Artificial Sequence: Synthetic peptide
ACAKDRYAS

SEQ ID NO: 44689 - protein, 9 aa, Artificial Sequence
  Description of Artificial Sequence: Synthetic peptide
KCMSALEQQ

SEQ ID NO: 44690 - protein, 9 aa, Artificial Sequence
  Description of Artificial Sequence: Synthetic peptide
ALTMLIKGC

SEQ ID NO: 44691 - protein, 9 aa, Artificial Sequence
  Description of Artificial Sequence: Synthetic peptide
SKTLFHMIQ

SEQ ID NO: 44692 - protein, 9 aa, Artificial Sequence
  Description of Artificial Sequence: Synthetic peptide
VSVIKFKGE

SEQ ID NO: 44693 - protein, 9 aa, Artificial Sequence
  Description of Artificial Sequence: Synthetic peptide
KPAEAHSVW

SEQ ID NO: 44694 - protein, 9 aa, Artificial Sequence
  Description of Artificial Sequence: Synthetic peptide
TRQLYGLHD

SEQ ID NO: 44695 - protein, 9 aa, Artificial Sequence
  Description of Artificial Sequence: Synthetic peptide
KKVMGMLYH

SEQ ID NO: 44696 - protein, 9 aa, Artificial Sequence
  Description of Artificial Sequence: Synthetic peptide
MKTPLAEAH

SEQ ID NO: 44697 - protein, 9 aa, Artificial Sequence
  Description of Artificial Sequence: Synthetic peptide
KVEGCKSHY

SEQ ID NO: 44698 - protein, 9 aa, Artificial Sequence
  Description of Artificial Sequence: Synthetic peptide
HVAMCSNLM

SEQ ID NO: 44699 - protein, 9 aa, Artificial Sequence
  Description of Artificial Sequence: Synthetic peptide
KKDTVNENA

SEQ ID NO: 44700 - protein, 9 aa, Artificial Sequence
  Description of Artificial Sequence: Synthetic peptide
LSGRMAQQA

SEQ ID NO: 44701 - protein, 9 aa, Artificial Sequence
  Description of Artificial Sequence: Synthetic peptide
ATLVKAFCA

SEQ ID NO: 44702 - protein, 9 aa, Artificial Sequence
  Description of Artificial Sequence: Synthetic peptide
ACTHLMCRP

SEQ ID NO: 44703 - protein, 9 aa, Artificial Sequence
  Description of Artificial Sequence: Synthetic peptide
QVTKLPPFS

SEQ ID NO: 44704 - protein, 9 aa, Artificial Sequence
  Description of Artificial Sequence: Synthetic peptide
SCHMIAEFA

SEQ ID NO: 44705 - protein, 9 aa, Artificial Sequence
  Description of Artificial Sequence: Synthetic peptide
SGYFRIQLS

SEQ ID NO: 44706 - protein, 9 aa, Artificial Sequence
  Description of Artificial Sequence: Synthetic peptide
STKIGAKFL

SEQ ID NO: 44707 - protein, 9 aa, Artificial Sequence
  Description of Artificial Sequence: Synthetic peptide
TSNFNCKMW

SEQ ID NO: 44708 - protein, 9 aa, Artificial Sequence
  Description of Artificial Sequence: Synthetic peptide
GSQRIGIIP

SEQ ID NO: 44709 - protein, 9 aa, Artificial Sequence
  Description of Artificial Sequence: Synthetic peptide
QRAGSFGWD

SEQ ID NO: 44710 - protein, 9 aa, Artificial Sequence
  Description of Artificial Sequence: Synthetic peptide
NMRMWEWTT

SEQ ID NO: 44711 - protein, 9 aa, Artificial Sequence
  Description of Artificial Sequence: Synthetic peptide
IAVKAWFDH

SEQ ID NO: 44712 - protein, 9 aa, Artificial Sequence
  Description of Artificial Sequence: Synthetic peptide
KSNKRCGHL

SEQ ID NO: 44713 - protein, 9 aa, Artificial Sequence
  Description of Artificial Sequence: Synthetic peptide
MGLQRMEFC

SEQ ID NO: 44714 - protein, 9 aa, Artificial Sequence
  Description of Artificial Sequence: Synthetic peptide
KPSHYSCAF

SEQ ID NO: 44715 - protein, 9 aa, Artificial Sequence
  Description of Artificial Sequence: Synthetic peptide
KGATDVPSG

SEQ ID NO: 44716 - protein, 9 aa, Artificial Sequence
  Description of Artificial Sequence: Synthetic peptide
LAIKCMDFW

SEQ ID NO: 44717 - protein, 9 aa, Artificial Sequence
  Description of Artificial Sequence: Synthetic peptide
ADNFLVKHG

SEQ ID NO: 44718 - protein, 9 aa, Artificial Sequence
  Description of Artificial Sequence: Synthetic peptide
SRVIRSDSC

SEQ ID NO: 44719 - protein, 9 aa, Artificial Sequence
  Description of Artificial Sequence: Synthetic peptide
MKQFCTCMS

SEQ ID NO: 44720 - protein, 9 aa, Artificial Sequence
  Description of Artificial Sequence: Synthetic peptide
NCLLQWGQC

SEQ ID NO: 44721 - protein, 9 aa, Artificial Sequence
  Description of Artificial Sequence: Synthetic peptide
GAAVLSALH

SEQ ID NO: 44722 - protein, 9 aa, Artificial Sequence
  Description of Artificial Sequence: Synthetic peptide
KKNTAFAST

SEQ ID NO: 44723 - protein, 9 aa, Artificial Sequence
  Description of Artificial Sequence: Synthetic peptide
QRTATLEAW

SEQ ID NO: 44724 - protein, 9 aa, Artificial Sequence
  Description of Artificial Sequence: Synthetic peptide
SKLTVAAVE

SEQ ID NO: 44725 - protein, 9 aa, Artificial Sequence
  Description of Artificial Sequence: Synthetic peptide
SMYRVMPCV

SEQ ID NO: 44726 - protein, 9 aa, Artificial Sequence
  Description of Artificial Sequence: Synthetic peptide
HGILQNCFI

SEQ ID NO: 44727 - protein, 9 aa, Artificial Sequence
  Description of Artificial Sequence: Synthetic peptide
LTVQLLECA

SEQ ID NO: 44728 - protein, 9 aa, Artificial Sequence
  Description of Artificial Sequence: Synthetic peptide
MMMRQHLYG

SEQ ID NO: 44729 - protein, 9 aa, Artificial Sequence
  Description of Artificial Sequence: Synthetic peptide
TAHFSFDTA

SEQ ID NO: 44730 - protein, 9 aa, Artificial Sequence
  Description of Artificial Sequence: Synthetic peptide
QKKLWYGPV

SEQ ID NO: 44731 - protein, 9 aa, Artificial Sequence
  Description of Artificial Sequence: Synthetic peptide
VGHKLSGNC

SEQ ID NO: 44732 - protein, 9 aa, Artificial Sequence
  Description of Artificial Sequence: Synthetic peptide
TKLQFTSPH

SEQ ID NO: 44733 - protein, 9 aa, Artificial Sequence
  Description of Artificial Sequence: Synthetic peptide
VGNFLYRAY

SEQ ID NO: 44734 - protein, 9 aa, Artificial Sequence
  Description of Artificial Sequence: Synthetic peptide
TSGTSYQCQ

SEQ ID NO: 44735 - protein, 9 aa, Artificial Sequence
  Description of Artificial Sequence: Synthetic peptide
RWQNAYEVS

SEQ ID NO: 44736 - protein, 9 aa, Artificial Sequence
  Description of Artificial Sequence: Synthetic peptide
ARVMFDMSR

SEQ ID NO: 44737 - protein, 9 aa, Artificial Sequence
  Description of Artificial Sequence: Synthetic peptide
SGQFFNVSL

SEQ ID NO: 44738 - protein, 9 aa, Artificial Sequence
  Description of Artificial Sequence: Synthetic peptide
VSMMLCASL

SEQ ID NO: 44739 - protein, 9 aa, Artificial Sequence
  Description of Artificial Sequence: Synthetic peptide
KGGLQENFG

SEQ ID NO: 44740 - protein, 9 aa, Artificial Sequence
  Description of Artificial Sequence: Synthetic peptide
TALAKLHVG

SEQ ID NO: 44741 - protein, 9 aa, Artificial Sequence
  Description of Artificial Sequence: Synthetic peptide
ACQPSFAGR

SEQ ID NO: 44742 - protein, 9 aa, Artificial Sequence
  Description of Artificial Sequence: Synthetic peptide
ADKPLYQNE

SEQ ID NO: 44743 - protein, 9 aa, Artificial Sequence
  Description of Artificial Sequence: Synthetic peptide
DWVLWTRIC

SEQ ID NO: 44744 - protein, 9 aa, Artificial Sequence
  Description of Artificial Sequence: Synthetic peptide
VANAHWCVG

SEQ ID NO: 44745 - protein, 9 aa, Artificial Sequence
  Description of Artificial Sequence: Synthetic peptide
SCAKTFAYS

SEQ ID NO: 44746 - protein, 9 aa, Artificial Sequence
  Description of Artificial Sequence: Synthetic peptide
KIQQDIDMG

SEQ ID NO: 44747 - protein, 9 aa, Artificial Sequence
  Description of Artificial Sequence: Synthetic peptide
KLKTQELWS

SEQ ID NO: 44748 - protein, 9 aa, Artificial Sequence
  Description of Artificial Sequence: Synthetic peptide
IVMREAQAS

SEQ ID NO: 44749 - protein, 9 aa, Artificial Sequence
  Description of Artificial Sequence: Synthetic peptide
TKNFTKGAW

SEQ ID NO: 44750 - protein, 9 aa, Artificial Sequence
  Description of Artificial Sequence: Synthetic peptide
LCAKEGSHE

SEQ ID NO: 44751 - protein, 9 aa, Artificial Sequence
  Description of Artificial Sequence: Synthetic peptide
TCLHVWQCG

SEQ ID NO: 44752 - protein, 9 aa, Artificial Sequence
  Description of Artificial Sequence: Synthetic peptide
TSHVMYQYC

SEQ ID NO: 44753 - protein, 9 aa, Artificial Sequence
  Description of Artificial Sequence: Synthetic peptide
AAVMQFMGV

SEQ ID NO: 44754 - protein, 9 aa, Artificial Sequence
  Description of Artificial Sequence: Synthetic peptide
KMDWPNVLN

SEQ ID NO: 44755 - protein, 9 aa, Artificial Sequence
  Description of Artificial Sequence: Synthetic peptide
TNQRIPNCE

SEQ ID NO: 44756 - protein, 9 aa, Artificial Sequence
  Description of Artificial Sequence: Synthetic peptide
RSKDGGNCW

SEQ ID NO: 44757 - protein, 9 aa, Artificial Sequence
  Description of Artificial Sequence: Synthetic peptide
SHTIFLHSF

SEQ ID NO: 44758 - protein, 9 aa, Artificial Sequence
  Description of Artificial Sequence: Synthetic peptide
TGRLQEAYA

SEQ ID NO: 44759 - protein, 9 aa, Artificial Sequence
  Description of Artificial Sequence: Synthetic peptide
SFCFCSANF

SEQ ID NO: 44760 - protein, 9 aa, Artificial Sequence
  Description of Artificial Sequence: Synthetic peptide
TASFFMSVM

SEQ ID NO: 44761 - protein, 9 aa, Artificial Sequence
  Description of Artificial Sequence: Synthetic peptide
ACQRVEKYT

SEQ ID NO: 44762 - protein, 9 aa, Artificial Sequence
  Description of Artificial Sequence: Synthetic peptide
RAIAGGECV

SEQ ID NO: 44763 - protein, 9 aa, Artificial Sequence
  Description of Artificial Sequence: Synthetic peptide
VAVKGWWGT

SEQ ID NO: 44764 - protein, 9 aa, Artificial Sequence
  Description of Artificial Sequence: Synthetic peptide
KRCVTHECR

SEQ ID NO: 44765 - protein, 9 aa, Artificial Sequence
  Description of Artificial Sequence: Synthetic peptide
TAYMTFDQA

SEQ ID NO: 44766 - protein, 9 aa, Artificial Sequence
  Description of Artificial Sequence: Synthetic peptide
SSYRGVACE

SEQ ID NO: 44767 - protein, 9 aa, Artificial Sequence
  Description of Artificial Sequence: Synthetic peptide
FCGSCVAFE

SEQ ID NO: 44768 - protein, 9 aa, Artificial Sequence
  Description of Artificial Sequence: Synthetic peptide
AMGINMSGF

SEQ ID NO: 44769 - protein, 9 aa, Artificial Sequence
  Description of Artificial Sequence: Synthetic peptide
KVVPNFPAQ

SEQ ID NO: 44770 - protein, 9 aa, Artificial Sequence
  Description of Artificial Sequence: Synthetic peptide
TCSKDGSWW

SEQ ID NO: 44771 - protein, 9 aa, Artificial Sequence
  Description of Artificial Sequence: Synthetic peptide
ERSPTFESQ

SEQ ID NO: 44772 - protein, 9 aa, Artificial Sequence
  Description of Artificial Sequence: Synthetic peptide
LKASYHYQR

SEQ ID NO: 44773 - protein, 9 aa, Artificial Sequence
  Description of Artificial Sequence: Synthetic peptide
FANTLANNA

SEQ ID NO: 44774 - protein, 9 aa, Artificial Sequence
  Description of Artificial Sequence: Synthetic peptide
ATRQDGMAY

SEQ ID NO: 44775 - protein, 9 aa, Artificial Sequence
  Description of Artificial Sequence: Synthetic peptide
SPASCQAAA

SEQ ID NO: 44776 - protein, 9 aa, Artificial Sequence
  Description of Artificial Sequence: Synthetic peptide
AMGFSPHER

SEQ ID NO: 44777 - protein, 9 aa, Artificial Sequence
  Description of Artificial Sequence: Synthetic peptide
SRYVVNSAH

SEQ ID NO: 44778 - protein, 9 aa, Artificial Sequence
  Description of Artificial Sequence: Synthetic peptide
MANIWHKGA

SEQ ID NO: 44779 - protein, 9 aa, Artificial Sequence
  Description of Artificial Sequence: Synthetic peptide
TKTPCWVWS

SEQ ID NO: 44780 - protein, 9 aa, Artificial Sequence
  Description of Artificial Sequence: Synthetic peptide
AWGSFIHMR

SEQ ID NO: 44781 - protein, 9 aa, Artificial Sequence
  Description of Artificial Sequence: Synthetic peptide
VYNFSARER

SEQ ID NO: 44782 - protein, 9 aa, Artificial Sequence
  Description of Artificial Sequence: Synthetic peptide
VIAKMCEQN

SEQ ID NO: 44783 - protein, 9 aa, Artificial Sequence
  Description of Artificial Sequence: Synthetic peptide
NCNLYYDHL

SEQ ID NO: 44784 - protein, 9 aa, Artificial Sequence
  Description of Artificial Sequence: Synthetic peptide
TIFTTYSMK

SEQ ID NO: 44785 - protein, 9 aa, Artificial Sequence
  Description of Artificial Sequence: Synthetic peptide
LAGKAQMWQ

SEQ ID NO: 44786 - protein, 9 aa, Artificial Sequence
  Description of Artificial Sequence: Synthetic peptide
KMNGCQSTE

SEQ ID NO: 44787 - protein, 9 aa, Artificial Sequence
  Description of Artificial Sequence: Synthetic peptide
MKQRTWSGK

SEQ ID NO: 44788 - protein, 9 aa, Artificial Sequence
  Description of Artificial Sequence: Synthetic peptide
MMVVWQNMC

SEQ ID NO: 44789 - protein, 9 aa, Artificial Sequence
  Description of Artificial Sequence: Synthetic peptide
FCVYFVDGK

SEQ ID NO: 44790 - protein, 9 aa, Artificial Sequence
  Description of Artificial Sequence: Synthetic peptide
SAMIAGLGK

SEQ ID NO: 44791 - protein, 9 aa, Artificial Sequence
  Description of Artificial Sequence: Synthetic peptide
DRKLFQFSG

SEQ ID NO: 44792 - protein, 9 aa, Artificial Sequence
  Description of Artificial Sequence: Synthetic peptide
TSWTCPRFG

SEQ ID NO: 44793 - protein, 9 aa, Artificial Sequence
  Description of Artificial Sequence: Synthetic peptide
MMKILQHSA

SEQ ID NO: 44794 - protein, 9 aa, Artificial Sequence
  Description of Artificial Sequence: Synthetic peptide
QIVVWFKEP

SEQ ID NO: 44795 - protein, 9 aa, Artificial Sequence
  Description of Artificial Sequence: Synthetic peptide
VSRITTIMA

SEQ ID NO: 44796 - protein, 9 aa, Artificial Sequence
  Description of Artificial Sequence: Synthetic peptide
SAGSCAHMQ

SEQ ID NO: 44797 - protein, 9 aa, Artificial Sequence
  Description of Artificial Sequence: Synthetic peptide
LSLRLERMC

SEQ ID NO: 44798 - protein, 9 aa, Artificial Sequence
  Description of Artificial Sequence: Synthetic peptide
KGTPNLVSE

SEQ ID NO: 44799 - protein, 9 aa, Artificial Sequence
  Description of Artificial Sequence: Synthetic peptide
TMFSCKYIG

SEQ ID NO: 44800 - protein, 9 aa, Artificial Sequence
  Description of Artificial Sequence: Synthetic peptide
VTNMRLEGV

SEQ ID NO: 44801 - protein, 9 aa, Artificial Sequence
  Description of Artificial Sequence: Synthetic peptide
AVKLPMCVD

SEQ ID NO: 44802 - protein, 9 aa, Artificial Sequence
  Description of Artificial Sequence: Synthetic peptide
KINLTQSAT

SEQ ID NO: 44803 - protein, 9 aa, Artificial Sequence
  Description of Artificial Sequence: Synthetic peptide
SAQTHIKFM

SEQ ID NO: 44804 - protein, 9 aa, Artificial Sequence
  Description of Artificial Sequence: Synthetic peptide
TAVIRSNTA

SEQ ID NO: 44805 - protein, 9 aa, Artificial Sequence
  Description of Artificial Sequence: Synthetic peptide
VFNRLIQSI

SEQ ID NO: 44806 - protein, 9 aa, Artificial Sequence
  Description of Artificial Sequence: Synthetic peptide
QKAHIFDVT

SEQ ID NO: 44807 - protein, 9 aa, Artificial Sequence
  Description of Artificial Sequence: Synthetic peptide
NSSKLIKYT

SEQ ID NO: 44808 - protein, 9 aa, Artificial Sequence
  Description of Artificial Sequence: Synthetic peptide
GAGKSNCNP

SEQ ID NO: 44809 - protein, 9 aa, Artificial Sequence
  Description of Artificial Sequence: Synthetic peptide
RGDTQHCMY

SEQ ID NO: 44810 - protein, 9 aa, Artificial Sequence
  Description of Artificial Sequence: Synthetic peptide
KKEYNNGWW

SEQ ID NO: 44811 - protein, 9 aa, Artificial Sequence
  Description of Artificial Sequence: Synthetic peptide
AAYQMTGIY

SEQ ID NO: 44812 - protein, 9 aa, Artificial Sequence
  Description of Artificial Sequence: Synthetic peptide
TAMHTHKLG

SEQ ID NO: 44813 - protein, 9 aa, Artificial Sequence
  Description of Artificial Sequence: Synthetic peptide
NHNMCAVVV

SEQ ID NO: 44814 - protein, 9 aa, Artificial Sequence
  Description of Artificial Sequence: Synthetic peptide
DNRFMFVDT

SEQ ID NO: 44815 - protein, 9 aa, Artificial Sequence
  Description of Artificial Sequence: Synthetic peptide
KWAENTVSG

SEQ ID NO: 44816 - protein, 9 aa, Artificial Sequence
  Description of Artificial Sequence: Synthetic peptide
HALLKMCEG

SEQ ID NO: 44817 - protein, 9 aa, Artificial Sequence
  Description of Artificial Sequence: Synthetic peptide
ISSTCKFGQ

SEQ ID NO: 44818 - protein, 9 aa, Artificial Sequence
  Description of Artificial Sequence: Synthetic peptide
TRLKLDVWS

SEQ ID NO: 44819 - protein, 9 aa, Artificial Sequence
  Description of Artificial Sequence: Synthetic peptide
SAYQLTGTA

SEQ ID NO: 44820 - protein, 9 aa, Artificial Sequence
  Description of Artificial Sequence: Synthetic peptide
ACVASIGMK

SEQ ID NO: 44821 - protein, 9 aa, Artificial Sequence
  Description of Artificial Sequence: Synthetic peptide
FCRIHMMCW

SEQ ID NO: 44822 - protein, 9 aa, Artificial Sequence
  Description of Artificial Sequence: Synthetic peptide
QCRKDWGHY

SEQ ID NO: 44823 - protein, 9 aa, Artificial Sequence
  Description of Artificial Sequence: Synthetic peptide
FCNTLVISA

SEQ ID NO: 44824 - protein, 9 aa, Artificial Sequence
  Description of Artificial Sequence: Synthetic peptide
AWYRTEQMW

SEQ ID NO: 44825 - protein, 9 aa, Artificial Sequence
  Description of Artificial Sequence: Synthetic peptide
TMKSWVHGC

SEQ ID NO: 44826 - protein, 9 aa, Artificial Sequence
  Description of Artificial Sequence: Synthetic peptide
SAAGMNDCL

SEQ ID NO: 44827 - protein, 9 aa, Artificial Sequence
  Description of Artificial Sequence: Synthetic peptide
KTTTCWADP

SEQ ID NO: 44828 - protein, 9 aa, Artificial Sequence
  Description of Artificial Sequence: Synthetic peptide
ARRIEEGYG

SEQ ID NO: 44829 - protein, 9 aa, Artificial Sequence
  Description of Artificial Sequence: Synthetic peptide
LCMPLLTFD

SEQ ID NO: 44830 - protein, 9 aa, Artificial Sequence
  Description of Artificial Sequence: Synthetic peptide
NGNVVMKEY

SEQ ID NO: 44831 - protein, 9 aa, Artificial Sequence
  Description of Artificial Sequence: Synthetic peptide
SSLTCSHSV

SEQ ID NO: 44832 - protein, 9 aa, Artificial Sequence
  Description of Artificial Sequence: Synthetic peptide
QGLKIYCHP

SEQ ID NO: 44833 - protein, 9 aa, Artificial Sequence
  Description of Artificial Sequence: Synthetic peptide
AGVGSWQNE

SEQ ID NO: 44834 - protein, 9 aa, Artificial Sequence
  Description of Artificial Sequence: Synthetic peptide
KGAIQQEWW

SEQ ID NO: 44835 - protein, 9 aa, Artificial Sequence
  Description of Artificial Sequence: Synthetic peptide
AKNPYLWYQ

SEQ ID NO: 44836 - protein, 9 aa, Artificial Sequence
  Description of Artificial Sequence: Synthetic peptide
ACSILYRHL

SEQ ID NO: 44837 - protein, 9 aa, Artificial Sequence
  Description of Artificial Sequence: Synthetic peptide
NTWMNLESC

SEQ ID NO: 44838 - protein, 9 aa, Artificial Sequence
  Description of Artificial Sequence: Synthetic peptide
TGGQLFQCW

SEQ ID NO: 44839 - protein, 9 aa, Artificial Sequence
  Description of Artificial Sequence: Synthetic peptide
MNVKKSGSL

SEQ ID NO: 44840 - protein, 9 aa, Artificial Sequence
  Description of Artificial Sequence: Synthetic peptide
MGLPVADWG

SEQ ID NO: 44841 - protein, 9 aa, Artificial Sequence
  Description of Artificial Sequence: Synthetic peptide
FSTSHFHLW

SEQ ID NO: 44842 - protein, 9 aa, Artificial Sequence
  Description of Artificial Sequence: Synthetic peptide
GSVKGMSVS

SEQ ID NO: 44843 - protein, 9 aa, Artificial Sequence
  Description of Artificial Sequence: Synthetic peptide
YSGMFHEGR

SEQ ID NO: 44844 - protein, 9 aa, Artificial Sequence
  Description of Artificial Sequence: Synthetic peptide
GWKPYAYAE

SEQ ID NO: 44845 - protein, 9 aa, Artificial Sequence
  Description of Artificial Sequence: Synthetic peptide
ACCLTMCSY

SEQ ID NO: 44846 - protein, 9 aa, Artificial Sequence
  Description of Artificial Sequence: Synthetic peptide
STRTTSSSM

SEQ ID NO: 44847 - protein, 9 aa, Artificial Sequence
  Description of Artificial Sequence: Synthetic peptide
AAVPCSMQQ

SEQ ID NO: 44848 - protein, 9 aa, Artificial Sequence
  Description of Artificial Sequence: Synthetic peptide
STQMQTVGL

SEQ ID NO: 44849 - protein, 9 aa, Artificial Sequence
  Description of Artificial Sequence: Synthetic peptide
NFFLTAVEH

SEQ ID NO: 44850 - protein, 9 aa, Artificial Sequence
  Description of Artificial Sequence: Synthetic peptide
YAQSKVRMG

SEQ ID NO: 44851 - protein, 9 aa, Artificial Sequence
  Description of Artificial Sequence: Synthetic peptide
AGGKAQAVE

SEQ ID NO: 44852 - protein, 9 aa, Artificial Sequence
  Description of Artificial Sequence: Synthetic peptide
TATLCANFC

SEQ ID NO: 44853 - protein, 9 aa, Artificial Sequence
  Description of Artificial Sequence: Synthetic peptide
TGTVKMGME

SEQ ID NO: 44854 - protein, 9 aa, Artificial Sequence
  Description of Artificial Sequence: Synthetic peptide
TTYIRLGGP

SEQ ID NO: 44855 - protein, 9 aa, Artificial Sequence
  Description of Artificial Sequence: Synthetic peptide
SVFLSQSCR

SEQ ID NO: 44856 - protein, 9 aa, Artificial Sequence
  Description of Artificial Sequence: Synthetic peptide
AKYEKVGMA

SEQ ID NO: 44857 - protein, 9 aa, Artificial Sequence
  Description of Artificial Sequence: Synthetic peptide
ITQIWARVI

SEQ ID NO: 44858 - protein, 9 aa, Artificial Sequence
  Description of Artificial Sequence: Synthetic peptide
QMNRLGNWN

SEQ ID NO: 44859 - protein, 9 aa, Artificial Sequence
  Description of Artificial Sequence: Synthetic peptide
QSSWHSKVW

SEQ ID NO: 44860 - protein, 9 aa, Artificial Sequence
  Description of Artificial Sequence: Synthetic peptide
KSDQSVCDQ

SEQ ID NO: 44861 - protein, 9 aa, Artificial Sequence
  Description of Artificial Sequence: Synthetic peptide
LAASCGHVG

SEQ ID NO: 44862 - protein, 9 aa, Artificial Sequence
  Description of Artificial Sequence: Synthetic peptide
GATTCKQID

SEQ ID NO: 44863 - protein, 9 aa, Artificial Sequence
  Description of Artificial Sequence: Synthetic peptide
YKNHFMHMW

SEQ ID NO: 44864 - protein, 9 aa, Artificial Sequence
  Description of Artificial Sequence: Synthetic peptide
VALVVVMSH

SEQ ID NO: 44865 - protein, 9 aa, Artificial Sequence
  Description of Artificial Sequence: Synthetic peptide
ACVTNLWGD

SEQ ID NO: 44866 - protein, 9 aa, Artificial Sequence
  Description of Artificial Sequence: Synthetic peptide
MMMRQEFCE

SEQ ID NO: 44867 - protein, 9 aa, Artificial Sequence
  Description of Artificial Sequence: Synthetic peptide
IRKYYHNGV

SEQ ID NO: 44868 - protein, 9 aa, Artificial Sequence
  Description of Artificial Sequence: Synthetic peptide
KFAIAQPVS

SEQ ID NO: 44869 - protein, 9 aa, Artificial Sequence
  Description of Artificial Sequence: Synthetic peptide
TAMKQPTLP

SEQ ID NO: 44870 - protein, 9 aa, Artificial Sequence
  Description of Artificial Sequence: Synthetic peptide
SVIIHPSYE

SEQ ID NO: 44871 - protein, 9 aa, Artificial Sequence
  Description of Artificial Sequence: Synthetic peptide
VGAQFAVQF

SEQ ID NO: 44872 - protein, 9 aa, Artificial Sequence
  Description of Artificial Sequence: Synthetic peptide
SKNELFVMH

SEQ ID NO: 44873 - protein, 9 aa, Artificial Sequence
  Description of Artificial Sequence: Synthetic peptide
TACFNALSC

SEQ ID NO: 44874 - protein, 9 aa, Artificial Sequence
  Description of Artificial Sequence: Synthetic peptide
DCYKSIVGV

SEQ ID NO: 44875 - protein, 9 aa, Artificial Sequence
  Description of Artificial Sequence: Synthetic peptide
VKFLVQQGQ

SEQ ID NO: 44876 - protein, 9 aa, Artificial Sequence
  Description of Artificial Sequence: Synthetic peptide
GTQTRFDNS

SEQ ID NO: 44877 - protein, 9 aa, Artificial Sequence
  Description of Artificial Sequence: Synthetic peptide
KSGPVVCKI

SEQ ID NO: 44878 - protein, 9 aa, Artificial Sequence
  Description of Artificial Sequence: Synthetic peptide
VAHISSGAL

SEQ ID NO: 44879 - protein, 9 aa, Artificial Sequence
  Description of Artificial Sequence: Synthetic peptide
ARNLAQGGY

SEQ ID NO: 44880 - protein, 9 aa, Artificial Sequence
  Description of Artificial Sequence: Synthetic peptide
VFGINGKCY

SEQ ID NO: 44881 - protein, 9 aa, Artificial Sequence
  Description of Artificial Sequence: Synthetic peptide
FFTQCARVP

SEQ ID NO: 44882 - protein, 9 aa, Artificial Sequence
  Description of Artificial Sequence: Synthetic peptide
TSWFKDCVG

SEQ ID NO: 44883 - protein, 9 aa, Artificial Sequence
  Description of Artificial Sequence: Synthetic peptide
STQIWSKMH

SEQ ID NO: 44884 - protein, 9 aa, Artificial Sequence
  Description of Artificial Sequence: Synthetic peptide
ISGTNRMVP

SEQ ID NO: 44885 - protein, 9 aa, Artificial Sequence
  Description of Artificial Sequence: Synthetic peptide
GAHTCAKAG

SEQ ID NO: 44886 - protein, 9 aa, Artificial Sequence
  Description of Artificial Sequence: Synthetic peptide
TIVFSLHRD

SEQ ID NO: 44887 - protein, 9 aa, Artificial Sequence
  Description of Artificial Sequence: Synthetic peptide
MCAQMMGVE

SEQ ID NO: 44888 - protein, 9 aa, Artificial Sequence
  Description of Artificial Sequence: Synthetic peptide
TSASCCQLT

SEQ ID NO: 44889 - protein, 9 aa, Artificial Sequence
  Description of Artificial Sequence: Synthetic peptide
KGRWVDPMA

SEQ ID NO: 44890 - protein, 9 aa, Artificial Sequence
  Description of Artificial Sequence: Synthetic peptide
MWKEITGQS

SEQ ID NO: 44891 - protein, 9 aa, Artificial Sequence
  Description of Artificial Sequence: Synthetic peptide
SALITNADQ

SEQ ID NO: 44892 - protein, 9 aa, Artificial Sequence
  Description of Artificial Sequence: Synthetic peptide
TCTTLTNQA

SEQ ID NO: 44893 - protein, 9 aa, Artificial Sequence
  Description of Artificial Sequence: Synthetic peptide
SSVHQMLTC

SEQ ID NO: 44894 - protein, 9 aa, Artificial Sequence
  Description of Artificial Sequence: Synthetic peptide
AGKITWQND

SEQ ID NO: 44895 - protein, 9 aa, Artificial Sequence
  Description of Artificial Sequence: Synthetic peptide
SGKTHSGEQ

SEQ ID NO: 44896 - protein, 9 aa, Artificial Sequence
  Description of Artificial Sequence: Synthetic peptide
MGHMCPGCF

SEQ ID NO: 44897 - protein, 9 aa, Artificial Sequence
  Description of Artificial Sequence: Synthetic peptide
TSTLHFSAD

SEQ ID NO: 44898 - protein, 9 aa, Artificial Sequence
  Description of Artificial Sequence: Synthetic peptide
KYETENGIK

SEQ ID NO: 44899 - protein, 9 aa, Artificial Sequence
  Description of Artificial Sequence: Synthetic peptide
RASVTMGSA

SEQ ID NO: 44900 - protein, 9 aa, Artificial Sequence
  Description of Artificial Sequence: Synthetic peptide
VTQKCREYW

SEQ ID NO: 44901 - protein, 9 aa, Artificial Sequence
  Description of Artificial Sequence: Synthetic peptide
FTTVCAGCV

SEQ ID NO: 44902 - protein, 9 aa, Artificial Sequence
  Description of Artificial Sequence: Synthetic peptide
MRVTYPWAD

SEQ ID NO: 44903 - protein, 9 aa, Artificial Sequence
  Description of Artificial Sequence: Synthetic peptide
AGAFMMPNW

SEQ ID NO: 44904 - protein, 9 aa, Artificial Sequence
  Description of Artificial Sequence: Synthetic peptide
SKSDKLECR

SEQ ID NO: 44905 - protein, 9 aa, Artificial Sequence
  Description of Artificial Sequence: Synthetic peptide
GGTYKLNGC

SEQ ID NO: 44906 - protein, 9 aa, Artificial Sequence
  Description of Artificial Sequence: Synthetic peptide
KTIPVCAHS

SEQ ID NO: 44907 - protein, 9 aa, Artificial Sequence
  Description of Artificial Sequence: Synthetic peptide
KADQGVKDW

SEQ ID NO: 44908 - protein, 9 aa, Artificial Sequence
  Description of Artificial Sequence: Synthetic peptide
KSTPLAEGV

SEQ ID NO: 44909 - protein, 9 aa, Artificial Sequence
  Description of Artificial Sequence: Synthetic peptide
VGKGMNRFN

SEQ ID NO: 44910 - protein, 9 aa, Artificial Sequence
  Description of Artificial Sequence: Synthetic peptide
KINTECMHD

SEQ ID NO: 44911 - protein, 9 aa, Artificial Sequence
  Description of Artificial Sequence: Synthetic peptide
MAIIMSELG

SEQ ID NO: 44912 - protein, 9 aa, Artificial Sequence
  Description of Artificial Sequence: Synthetic peptide
TPKHQQGYY

SEQ ID NO: 44913 - protein, 9 aa, Artificial Sequence
  Description of Artificial Sequence: Synthetic peptide
FREEYRRGG

SEQ ID NO: 44914 - protein, 9 aa, Artificial Sequence
  Description of Artificial Sequence: Synthetic peptide
ACNYFSREC

SEQ ID NO: 44915 - protein, 9 aa, Artificial Sequence
  Description of Artificial Sequence: Synthetic peptide
ATLKVMGHH

SEQ ID NO: 44916 - protein, 9 aa, Artificial Sequence
  Description of Artificial Sequence: Synthetic peptide
KCTTEGTNA

SEQ ID NO: 44917 - protein, 9 aa, Artificial Sequence
  Description of Artificial Sequence: Synthetic peptide
AMLMNTACG

SEQ ID NO: 44918 - protein, 9 aa, Artificial Sequence
  Description of Artificial Sequence: Synthetic peptide
TINRWMVAF

SEQ ID NO: 44919 - protein, 9 aa, Artificial Sequence
  Description of Artificial Sequence: Synthetic peptide
NGNMIWRGK

SEQ ID NO: 44920 - protein, 9 aa, Artificial Sequence
  Description of Artificial Sequence: Synthetic peptide
IVNTFWNYC

SEQ ID NO: 44921 - protein, 9 aa, Artificial Sequence
  Description of Artificial Sequence: Synthetic peptide
SVYLKPTVS

SEQ ID NO: 44922 - protein, 9 aa, Artificial Sequence
  Description of Artificial Sequence: Synthetic peptide
KHALAVSQP

SEQ ID NO: 44923 - protein, 9 aa, Artificial Sequence
  Description of Artificial Sequence: Synthetic peptide
VGNQIPRGE

SEQ ID NO: 44924 - protein, 9 aa, Artificial Sequence
  Description of Artificial Sequence: Synthetic peptide
STHILEGWD

SEQ ID NO: 44925 - protein, 9 aa, Artificial Sequence
  Description of Artificial Sequence: Synthetic peptide
KSVGGTEHP

SEQ ID NO: 44926 - protein, 9 aa, Artificial Sequence
  Description of Artificial Sequence: Synthetic peptide
QKNATAVNN

SEQ ID NO: 44927 - protein, 9 aa, Artificial Sequence
  Description of Artificial Sequence: Synthetic peptide
FCSQHLTGP

SEQ ID NO: 44928 - protein, 9 aa, Artificial Sequence
  Description of Artificial Sequence: Synthetic peptide
QCRVCQFHA

SEQ ID NO: 44929 - protein, 9 aa, Artificial Sequence
  Description of Artificial Sequence: Synthetic peptide
VAAQFSRFE

SEQ ID NO: 44930 - protein, 9 aa, Artificial Sequence
  Description of Artificial Sequence: Synthetic peptide
RSSSETLWS

SEQ ID NO: 44931 - protein, 9 aa, Artificial Sequence
  Description of Artificial Sequence: Synthetic peptide
HKKEFVMNS

SEQ ID NO: 44932 - protein, 9 aa, Artificial Sequence
  Description of Artificial Sequence: Synthetic peptide
TKNPTQLER

SEQ ID NO: 44933 - protein, 9 aa, Artificial Sequence
  Description of Artificial Sequence: Synthetic peptide
TGMVLNGAM

SEQ ID NO: 44934 - protein, 9 aa, Artificial Sequence
  Description of Artificial Sequence: Synthetic peptide
MKSHQMWVM

SEQ ID NO: 44935 - protein, 9 aa, Artificial Sequence
  Description of Artificial Sequence: Synthetic peptide
VPKYWQQAC

SEQ ID NO: 44936 - protein, 9 aa, Artificial Sequence
  Description of Artificial Sequence: Synthetic peptide
LVWRLHQAP

SEQ ID NO: 44937 - protein, 9 aa, Artificial Sequence
  Description of Artificial Sequence: Synthetic peptide
KSTAPEMMN

SEQ ID NO: 44938 - protein, 9 aa, Artificial Sequence
  Description of Artificial Sequence: Synthetic peptide
SFVIHSRTA

SEQ ID NO: 44939 - protein, 9 aa, Artificial Sequence
  Description of Artificial Sequence: Synthetic peptide
SMFIFLHIC

SEQ ID NO: 44940 - protein, 9 aa, Artificial Sequence
  Description of Artificial Sequence: Synthetic peptide
AMASFWECG

SEQ ID NO: 44941 - protein, 9 aa, Artificial Sequence
  Description of Artificial Sequence: Synthetic peptide
QSFIMYGDC

SEQ ID NO: 44942 - protein, 9 aa, Artificial Sequence
  Description of Artificial Sequence: Synthetic peptide
ASLKSMEYR

SEQ ID NO: 44943 - protein, 9 aa, Artificial Sequence
  Description of Artificial Sequence: Synthetic peptide
VGMANMTCQ

SEQ ID NO: 44944 - protein, 9 aa, Artificial Sequence
  Description of Artificial Sequence: Synthetic peptide
MCGHHAQLG

SEQ ID NO: 44945 - protein, 9 aa, Artificial Sequence
  Description of Artificial Sequence: Synthetic peptide
ISQLVWKCV

SEQ ID NO: 44946 - protein, 9 aa, Artificial Sequence
  Description of Artificial Sequence: Synthetic peptide
TAYRAIGPY

SEQ ID NO: 44947 - protein, 9 aa, Artificial Sequence
  Description of Artificial Sequence: Synthetic peptide
QRGTYNQMM

SEQ ID NO: 44948 - protein, 9 aa, Artificial Sequence
  Description of Artificial Sequence: Synthetic peptide
ATVGKVDIQ

SEQ ID NO: 44949 - protein, 9 aa, Artificial Sequence
  Description of Artificial Sequence: Synthetic peptide
KTATNMNSF

SEQ ID NO: 44950 - protein, 9 aa, Artificial Sequence
  Description of Artificial Sequence: Synthetic peptide
GCGLWVYSS

SEQ ID NO: 44951 - protein, 9 aa, Artificial Sequence
  Description of Artificial Sequence: Synthetic peptide
VTTSLMDSA

SEQ ID NO: 44952 - protein, 9 aa, Artificial Sequence
  Description of Artificial Sequence: Synthetic peptide
KSMMNESAV

SEQ ID NO: 44953 - protein, 9 aa, Artificial Sequence
  Description of Artificial Sequence: Synthetic peptide
TIIACPRGS

SEQ ID NO: 44954 - protein, 9 aa, Artificial Sequence
  Description of Artificial Sequence: Synthetic peptide
AAFGMNTFP

SEQ ID NO: 44955 - protein, 9 aa, Artificial Sequence
  Description of Artificial Sequence: Synthetic peptide
VLYKIWQEK

SEQ ID NO: 44956 - protein, 9 aa, Artificial Sequence
  Description of Artificial Sequence: Synthetic peptide
TCRRYECSV

SEQ ID NO: 44957 - protein, 9 aa, Artificial Sequence
  Description of Artificial Sequence: Synthetic peptide
EKAMKSCTF

SEQ ID NO: 44958 - protein, 9 aa, Artificial Sequence
  Description of Artificial Sequence: Synthetic peptide
AQNLHFYAP

SEQ ID NO: 44959 - protein, 9 aa, Artificial Sequence
  Description of Artificial Sequence: Synthetic peptide
AKSQCSKGL

SEQ ID NO: 44960 - protein, 9 aa, Artificial Sequence
  Description of Artificial Sequence: Synthetic peptide
VGTPTCQGV

SEQ ID NO: 44961 - protein, 9 aa, Artificial Sequence
  Description of Artificial Sequence: Synthetic peptide
GSHSHMLDR

SEQ ID NO: 44962 - protein, 9 aa, Artificial Sequence
  Description of Artificial Sequence: Synthetic peptide
SAAYRYCEP

SEQ ID NO: 44963 - protein, 9 aa, Artificial Sequence
  Description of Artificial Sequence: Synthetic peptide
KVNPLNGHW

SEQ ID NO: 44964 - protein, 9 aa, Artificial Sequence
  Description of Artificial Sequence: Synthetic peptide
GRIQFIMCG

SEQ ID NO: 44965 - protein, 9 aa, Artificial Sequence
  Description of Artificial Sequence: Synthetic peptide
KATQEVWHK

SEQ ID NO: 44966 - protein, 9 aa, Artificial Sequence
  Description of Artificial Sequence: Synthetic peptide
KKEAVGIMN

SEQ ID NO: 44967 - protein, 9 aa, Artificial Sequence
  Description of Artificial Sequence: Synthetic peptide
GASSSYQNS

SEQ ID NO: 44968 - protein, 9 aa, Artificial Sequence
  Description of Artificial Sequence: Synthetic peptide
EREAHCNQA

SEQ ID NO: 44969 - protein, 9 aa, Artificial Sequence
  Description of Artificial Sequence: Synthetic peptide
VPHISFKCC

SEQ ID NO: 44970 - protein, 9 aa, Artificial Sequence
  Description of Artificial Sequence: Synthetic peptide
LAHMAYPSV

SEQ ID NO: 44971 - protein, 9 aa, Artificial Sequence
  Description of Artificial Sequence: Synthetic peptide
TALVQYNYP

SEQ ID NO: 44972 - protein, 9 aa, Artificial Sequence
  Description of Artificial Sequence: Synthetic peptide
ESMRGQQWW

SEQ ID NO: 44973 - protein, 9 aa, Artificial Sequence
  Description of Artificial Sequence: Synthetic peptide
TVAFSMCRP

SEQ ID NO: 44974 - protein, 9 aa, Artificial Sequence
  Description of Artificial Sequence: Synthetic peptide
RCAMDIPHG

SEQ ID NO: 44975 - protein, 9 aa, Artificial Sequence
  Description of Artificial Sequence: Synthetic peptide
LAMPCSGLC

SEQ ID NO: 44976 - protein, 9 aa, Artificial Sequence
  Description of Artificial Sequence: Synthetic peptide
GKQFNMGDP

SEQ ID NO: 44977 - protein, 9 aa, Artificial Sequence
  Description of Artificial Sequence: Synthetic peptide
NKTLVGIQS

SEQ ID NO: 44978 - protein, 9 aa, Artificial Sequence
  Description of Artificial Sequence: Synthetic peptide
TANIASVPG

SEQ ID NO: 44979 - protein, 9 aa, Artificial Sequence
  Description of Artificial Sequence: Synthetic peptide
MIVKTVMDV

SEQ ID NO: 44980 - protein, 9 aa, Artificial Sequence
  Description of Artificial Sequence: Synthetic peptide
VTWSCSEIA

SEQ ID NO: 44981 - protein, 9 aa, Artificial Sequence
  Description of Artificial Sequence: Synthetic peptide
IGHGVQTAF

SEQ ID NO: 44982 - protein, 9 aa, Artificial Sequence
  Description of Artificial Sequence: Synthetic peptide
KCNNHVNSS

SEQ ID NO: 44983 - protein, 9 aa, Artificial Sequence
  Description of Artificial Sequence: Synthetic peptide
TRVPTQSIF

SEQ ID NO: 44984 - protein, 9 aa, Artificial Sequence
  Description of Artificial Sequence: Synthetic peptide
TCHVSQDCT

SEQ ID NO: 44985 - protein, 9 aa, Artificial Sequence
  Description of Artificial Sequence: Synthetic peptide
NTFMSTFLE

SEQ ID NO: 44986 - protein, 9 aa, Artificial Sequence
  Description of Artificial Sequence: Synthetic peptide
TYQFRNRSE

SEQ ID NO: 44987 - protein, 9 aa, Artificial Sequence
  Description of Artificial Sequence: Synthetic peptide
SAAWQKRCP

SEQ ID NO: 44988 - protein, 9 aa, Artificial Sequence
  Description of Artificial Sequence: Synthetic peptide
RKEEFHACN

SEQ ID NO: 44989 - protein, 9 aa, Artificial Sequence
  Description of Artificial Sequence: Synthetic peptide
GSMFTCYLA

SEQ ID NO: 44990 - protein, 9 aa, Artificial Sequence
  Description of Artificial Sequence: Synthetic peptide
GESRLNEHW

SEQ ID NO: 44991 - protein, 9 aa, Artificial Sequence
  Description of Artificial Sequence: Synthetic peptide
IKTPYCSSG

SEQ ID NO: 44992 - protein, 9 aa, Artificial Sequence
  Description of Artificial Sequence: Synthetic peptide
FANSTQGCA

SEQ ID NO: 44993 - protein, 9 aa, Artificial Sequence
  Description of Artificial Sequence: Synthetic peptide
AACLNTQYR

SEQ ID NO: 44994 - protein, 9 aa, Artificial Sequence
  Description of Artificial Sequence: Synthetic peptide
FISFHEGYR

SEQ ID NO: 44995 - protein, 9 aa, Artificial Sequence
  Description of Artificial Sequence: Synthetic peptide
HQMKAMNLG

SEQ ID NO: 44996 - protein, 9 aa, Artificial Sequence
  Description of Artificial Sequence: Synthetic peptide
ACMGIKHVH

SEQ ID NO: 44997 - protein, 9 aa, Artificial Sequence
  Description of Artificial Sequence: Synthetic peptide
IAQQTWQFE

SEQ ID NO: 44998 - protein, 9 aa, Artificial Sequence
  Description of Artificial Sequence: Synthetic peptide
ERYMFLNME

SEQ ID NO: 44999 - protein, 9 aa, Artificial Sequence
  Description of Artificial Sequence: Synthetic peptide
HKTPYPHLR

SEQ ID NO: 45000 - protein, 9 aa, Artificial Sequence
  Description of Artificial Sequence: Synthetic peptide
RAEMLHEAV

SEQ ID NO: 45001 - protein, 9 aa, Artificial Sequence
  Description of Artificial Sequence: Synthetic peptide
SGQHMPGCM

SEQ ID NO: 45002 - protein, 9 aa, Artificial Sequence
  Description of Artificial Sequence: Synthetic peptide
GYMLKSDVQ

SEQ ID NO: 45003 - protein, 9 aa, Artificial Sequence
  Description of Artificial Sequence: Synthetic peptide
YCVQTAFMH

SEQ ID NO: 45004 - protein, 9 aa, Artificial Sequence
  Description of Artificial Sequence: Synthetic peptide
FRAYFQSAQ

SEQ ID NO: 45005 - protein, 9 aa, Artificial Sequence
  Description of Artificial Sequence: Synthetic peptide
VSFTWNRCI

SEQ ID NO: 45006 - protein, 9 aa, Artificial Sequence
  Description of Artificial Sequence: Synthetic peptide
ACASLINQM

SEQ ID NO: 45007 - protein, 9 aa, Artificial Sequence
  Description of Artificial Sequence: Synthetic peptide
TNRHAEAYI

SEQ ID NO: 45008 - protein, 9 aa, Artificial Sequence
  Description of Artificial Sequence: Synthetic peptide
SCQPAYGGG

SEQ ID NO: 45009 - protein, 9 aa, Artificial Sequence
  Description of Artificial Sequence: Synthetic peptide
YTNLVIGVW

SEQ ID NO: 45010 - protein, 9 aa, Artificial Sequence
  Description of Artificial Sequence: Synthetic peptide
MIFVISVGN

SEQ ID NO: 45011 - protein, 9 aa, Artificial Sequence
  Description of Artificial Sequence: Synthetic peptide
TFYVQVNDK

SEQ ID NO: 45012 - protein, 9 aa, Artificial Sequence
  Description of Artificial Sequence: Synthetic peptide
SANKVVHTD

SEQ ID NO: 45013 - protein, 9 aa, Artificial Sequence
  Description of Artificial Sequence: Synthetic peptide
KCAMALIHK

SEQ ID NO: 45014 - protein, 9 aa, Artificial Sequence
  Description of Artificial Sequence: Synthetic peptide
MLFWFRCLL

SEQ ID NO: 45015 - protein, 9 aa, Artificial Sequence
  Description of Artificial Sequence: Synthetic peptide
DIEKLHHVF

SEQ ID NO: 45016 - protein, 9 aa, Artificial Sequence
  Description of Artificial Sequence: Synthetic peptide
RYVCPLDHY

SEQ ID NO: 45017 - protein, 9 aa, Artificial Sequence
  Description of Artificial Sequence: Synthetic peptide
SCCQEANGA

SEQ ID NO: 45018 - protein, 9 aa, Artificial Sequence
  Description of Artificial Sequence: Synthetic peptide
THYFRNMHG

SEQ ID NO: 45019 - protein, 9 aa, Artificial Sequence
  Description of Artificial Sequence: Synthetic peptide
AFVPFGNDL

SEQ ID NO: 45020 - protein, 9 aa, Artificial Sequence
  Description of Artificial Sequence: Synthetic peptide
LGKVVYQAY

SEQ ID NO: 45021 - protein, 9 aa, Artificial Sequence
  Description of Artificial Sequence: Synthetic peptide
ASKLDTALT

SEQ ID NO: 45022 - protein, 9 aa, Artificial Sequence
  Description of Artificial Sequence: Synthetic peptide
MCKLLATSQ

SEQ ID NO: 45023 - protein, 9 aa, Artificial Sequence
  Description of Artificial Sequence: Synthetic peptide
SLKAEYSGN

SEQ ID NO: 45024 - protein, 9 aa, Artificial Sequence
  Description of Artificial Sequence: Synthetic peptide
NTQTVNRMF

SEQ ID NO: 45025 - protein, 9 aa, Artificial Sequence
  Description of Artificial Sequence: Synthetic peptide
QVHKGWACV

SEQ ID NO: 45026 - protein, 9 aa, Artificial Sequence
  Description of Artificial Sequence: Synthetic peptide
SQRVWEQVC

SEQ ID NO: 45027 - protein, 9 aa, Artificial Sequence
  Description of Artificial Sequence: Synthetic peptide
THTKAQIGH

SEQ ID NO: 45028 - protein, 9 aa, Artificial Sequence
  Description of Artificial Sequence: Synthetic peptide
MGSRHFHFP

SEQ ID NO: 45029 - protein, 9 aa, Artificial Sequence
  Description of Artificial Sequence: Synthetic peptide
GHYVCSMAY

SEQ ID NO: 45030 - protein, 9 aa, Artificial Sequence
  Description of Artificial Sequence: Synthetic peptide
DKHGNANWN

SEQ ID NO: 45031 - protein, 9 aa, Artificial Sequence
  Description of Artificial Sequence: Synthetic peptide
GMSRQSIAD

SEQ ID NO: 45032 - protein, 9 aa, Artificial Sequence
  Description of Artificial Sequence: Synthetic peptide
KAEHFNVDA

SEQ ID NO: 45033 - protein, 9 aa, Artificial Sequence
  Description of Artificial Sequence: Synthetic peptide
IKMNHHIQG

SEQ ID NO: 45034 - protein, 9 aa, Artificial Sequence
  Description of Artificial Sequence: Synthetic peptide
IFGKQHRLH

SEQ ID NO: 45035 - protein, 9 aa, Artificial Sequence
  Description of Artificial Sequence: Synthetic peptide
ATGTKISVE

SEQ ID NO: 45036 - protein, 9 aa, Artificial Sequence
  Description of Artificial Sequence: Synthetic peptide
MAKINPLHG

SEQ ID NO: 45037 - protein, 9 aa, Artificial Sequence
  Description of Artificial Sequence: Synthetic peptide
TTRHCAYAQ

SEQ ID NO: 45038 - protein, 9 aa, Artificial Sequence
  Description of Artificial Sequence: Synthetic peptide
MIQFDMMHG

SEQ ID NO: 45039 - protein, 9 aa, Artificial Sequence
  Description of Artificial Sequence: Synthetic peptide
KTKSGAVFT

SEQ ID NO: 45040 - protein, 9 aa, Artificial Sequence
  Description of Artificial Sequence: Synthetic peptide
AQKLMMGQG

SEQ ID NO: 45041 - protein, 9 aa, Artificial Sequence
  Description of Artificial Sequence: Synthetic peptide
VSNLTWPGP

SEQ ID NO: 45042 - protein, 9 aa, Artificial Sequence
  Description of Artificial Sequence: Synthetic peptide
ESKIVRYNN

SEQ ID NO: 45043 - protein, 9 aa, Artificial Sequence
  Description of Artificial Sequence: Synthetic peptide
SAGRWCQTY

SEQ ID NO: 45044 - protein, 9 aa, Artificial Sequence
  Description of Artificial Sequence: Synthetic peptide
NGALQMVQW

SEQ ID NO: 45045 - protein, 9 aa, Artificial Sequence
  Description of Artificial Sequence: Synthetic peptide
GMFIQAVEA

SEQ ID NO: 45046 - protein, 9 aa, Artificial Sequence
  Description of Artificial Sequence: Synthetic peptide
AGNTTIKFE

SEQ ID NO: 45047 - protein, 9 aa, Artificial Sequence
  Description of Artificial Sequence: Synthetic peptide
AYFSCMHVN

SEQ ID NO: 45048 - protein, 9 aa, Artificial Sequence
  Description of Artificial Sequence: Synthetic peptide
LGMTCVAHG

SEQ ID NO: 45049 - protein, 9 aa, Artificial Sequence
  Description of Artificial Sequence: Synthetic peptide
VAILALRCH

SEQ ID NO: 45050 - protein, 9 aa, Artificial Sequence
  Description of Artificial Sequence: Synthetic peptide
TKQQVGDCW

SEQ ID NO: 45051 - protein, 9 aa, Artificial Sequence
  Description of Artificial Sequence: Synthetic peptide
TGLMLQQIC

SEQ ID NO: 45052 - protein, 9 aa, Artificial Sequence
  Description of Artificial Sequence: Synthetic peptide
NVHFLFNCA

SEQ ID NO: 45053 - protein, 9 aa, Artificial Sequence
  Description of Artificial Sequence: Synthetic peptide
NYRVAEWVA

SEQ ID NO: 45054 - protein, 9 aa, Artificial Sequence
  Description of Artificial Sequence: Synthetic peptide
AARIACFDS

SEQ ID NO: 45055 - protein, 9 aa, Artificial Sequence
  Description of Artificial Sequence: Synthetic peptide
VCVTKQMAC

SEQ ID NO: 45056 - protein, 9 aa, Artificial Sequence
  Description of Artificial Sequence: Synthetic peptide
DRRPVCCYT

SEQ ID NO: 45057 - protein, 9 aa, Artificial Sequence
  Description of Artificial Sequence: Synthetic peptide
KNDKGQCYF

SEQ ID NO: 45058 - protein, 9 aa, Artificial Sequence
  Description of Artificial Sequence: Synthetic peptide
LGIKSQDAA

SEQ ID NO: 45059 - protein, 9 aa, Artificial Sequence
  Description of Artificial Sequence: Synthetic peptide
QSALMSKYW

SEQ ID NO: 45060 - protein, 9 aa, Artificial Sequence
  Description of Artificial Sequence: Synthetic peptide
TVGIKFQEM

SEQ ID NO: 45061 - protein, 9 aa, Artificial Sequence
  Description of Artificial Sequence: Synthetic peptide
YTKFMSGGM

SEQ ID NO: 45062 - protein, 9 aa, Artificial Sequence
  Description of Artificial Sequence: Synthetic peptide
AFRSPNVMY

SEQ ID NO: 45063 - protein, 9 aa, Artificial Sequence
  Description of Artificial Sequence: Synthetic peptide
YSSLLALRA

SEQ ID NO: 45064 - protein, 9 aa, Artificial Sequence
  Description of Artificial Sequence: Synthetic peptide
TQAKLQCAE

SEQ ID NO: 45065 - protein, 9 aa, Artificial Sequence
  Description of Artificial Sequence: Synthetic peptide
TANHATMCD

SEQ ID NO: 45066 - protein, 9 aa, Artificial Sequence
  Description of Artificial Sequence: Synthetic peptide
SPQPILDLQ

SEQ ID NO: 45067 - protein, 9 aa, Artificial Sequence
  Description of Artificial Sequence: Synthetic peptide
TTVLIQICE

SEQ ID NO: 45068 - protein, 9 aa, Artificial Sequence
  Description of Artificial Sequence: Synthetic peptide
SAASLIPTL

SEQ ID NO: 45069 - protein, 9 aa, Artificial Sequence
  Description of Artificial Sequence: Synthetic peptide
MKVDSTFIH

SEQ ID NO: 45070 - protein, 9 aa, Artificial Sequence
  Description of Artificial Sequence: Synthetic peptide
LGAANQMCH

SEQ ID NO: 45071 - protein, 9 aa, Artificial Sequence
  Description of Artificial Sequence: Synthetic peptide
MSTADMIRI

SEQ ID NO: 45072 - protein, 9 aa, Artificial Sequence
  Description of Artificial Sequence: Synthetic peptide
KAALMGWEK

SEQ ID NO: 45073 - protein, 9 aa, Artificial Sequence
  Description of Artificial Sequence: Synthetic peptide
NCVVLQKLH

SEQ ID NO: 45074 - protein, 9 aa, Artificial Sequence
  Description of Artificial Sequence: Synthetic peptide
DRAPKLSWE

SEQ ID NO: 45075 - protein, 9 aa, Artificial Sequence
  Description of Artificial Sequence: Synthetic peptide
VCNQFQHWH

SEQ ID NO: 45076 - protein, 9 aa, Artificial Sequence
  Description of Artificial Sequence: Synthetic peptide
KISFEVTEY

SEQ ID NO: 45077 - protein, 9 aa, Artificial Sequence
  Description of Artificial Sequence: Synthetic peptide
TFYIWNHCD

SEQ ID NO: 45078 - protein, 9 aa, Artificial Sequence
  Description of Artificial Sequence: Synthetic peptide
MCKQIIQGG

SEQ ID NO: 45079 - protein, 9 aa, Artificial Sequence
  Description of Artificial Sequence: Synthetic peptide
SCSVWRCMS

SEQ ID NO: 45080 - protein, 9 aa, Artificial Sequence
  Description of Artificial Sequence: Synthetic peptide
VSILMYQNQ

SEQ ID NO: 45081 - protein, 9 aa, Artificial Sequence
  Description of Artificial Sequence: Synthetic peptide
TSMFYEMCN

SEQ ID NO: 45082 - protein, 9 aa, Artificial Sequence
  Description of Artificial Sequence: Synthetic peptide
SYKHCSQVG

SEQ ID NO: 45083 - protein, 9 aa, Artificial Sequence
  Description of Artificial Sequence: Synthetic peptide
FAAQWFWTG

SEQ ID NO: 45084 - protein, 9 aa, Artificial Sequence
  Description of Artificial Sequence: Synthetic peptide
TWATWLEGQ

SEQ ID NO: 45085 - protein, 9 aa, Artificial Sequence
  Description of Artificial Sequence: Synthetic peptide
SAQVCQFIQ

SEQ ID NO: 45086 - protein, 9 aa, Artificial Sequence
  Description of Artificial Sequence: Synthetic peptide
NAMSQVSLA

SEQ ID NO: 45087 - protein, 9 aa, Artificial Sequence
  Description of Artificial Sequence: Synthetic peptide
SNQFFPQSG

SEQ ID NO: 45088 - protein, 9 aa, Artificial Sequence
  Description of Artificial Sequence: Synthetic peptide
TGTLMGSQG

SEQ ID NO: 45089 - protein, 9 aa, Artificial Sequence
  Description of Artificial Sequence: Synthetic peptide
MCNYSNSGE

SEQ ID NO: 45090 - protein, 9 aa, Artificial Sequence
  Description of Artificial Sequence: Synthetic peptide
TCSQPPCCG

SEQ ID NO: 45091 - protein, 9 aa, Artificial Sequence
  Description of Artificial Sequence: Synthetic peptide
GHYIFNCSQ

SEQ ID NO: 45092 - protein, 9 aa, Artificial Sequence
  Description of Artificial Sequence: Synthetic peptide
IGHRYYWSM

SEQ ID NO: 45093 - protein, 9 aa, Artificial Sequence
  Description of Artificial Sequence: Synthetic peptide
GCHTIQFYR

SEQ ID NO: 45094 - protein, 9 aa, Artificial Sequence
  Description of Artificial Sequence: Synthetic peptide
NCNMYHYFA

SEQ ID NO: 45095 - protein, 9 aa, Artificial Sequence
  Description of Artificial Sequence: Synthetic peptide
GAQPRVVLS

SEQ ID NO: 45096 - protein, 9 aa, Artificial Sequence
  Description of Artificial Sequence: Synthetic peptide
KATCYMDAN

SEQ ID NO: 45097 - protein, 9 aa, Artificial Sequence
  Description of Artificial Sequence: Synthetic peptide
SAKQWTTVE

SEQ ID NO: 45098 - protein, 9 aa, Artificial Sequence
  Description of Artificial Sequence: Synthetic peptide
NANTNGHMF

SEQ ID NO: 45099 - protein, 9 aa, Artificial Sequence
  Description of Artificial Sequence: Synthetic peptide
TAGQPGILG

SEQ ID NO: 45100 - protein, 9 aa, Artificial Sequence
  Description of Artificial Sequence: Synthetic peptide
WGTYWFNMP

SEQ ID NO: 45101 - protein, 9 aa, Artificial Sequence
  Description of Artificial Sequence: Synthetic peptide
VSSKSVHDV

SEQ ID NO: 45102 - protein, 9 aa, Artificial Sequence
  Description of Artificial Sequence: Synthetic peptide
SPQSFPQFE

SEQ ID NO: 45103 - protein, 9 aa, Artificial Sequence
  Description of Artificial Sequence: Synthetic peptide
SKAANNQCC

SEQ ID NO: 45104 - protein, 9 aa, Artificial Sequence
  Description of Artificial Sequence: Synthetic peptide
MGYQPAVGN

SEQ ID NO: 45105 - protein, 9 aa, Artificial Sequence
  Description of Artificial Sequence: Synthetic peptide
AEMRTMIQA

SEQ ID NO: 45106 - protein, 9 aa, Artificial Sequence
  Description of Artificial Sequence: Synthetic peptide
GGTFIQGQG

SEQ ID NO: 45107 - protein, 9 aa, Artificial Sequence
  Description of Artificial Sequence: Synthetic peptide
KGTDDGQWQ

SEQ ID NO: 45108 - protein, 9 aa, Artificial Sequence
  Description of Artificial Sequence: Synthetic peptide
GCNIQNMAA

SEQ ID NO: 45109 - protein, 9 aa, Artificial Sequence
  Description of Artificial Sequence: Synthetic peptide
AGMGIHAMP

SEQ ID NO: 45110 - protein, 9 aa, Artificial Sequence
  Description of Artificial Sequence: Synthetic peptide
AGQLVQACH

SEQ ID NO: 45111 - protein, 9 aa, Artificial Sequence
  Description of Artificial Sequence: Synthetic peptide
TRDTFFKMG

SEQ ID NO: 45112 - protein, 9 aa, Artificial Sequence
  Description of Artificial Sequence: Synthetic peptide
STYVQMDGG

SEQ ID NO: 45113 - protein, 9 aa, Artificial Sequence
  Description of Artificial Sequence: Synthetic peptide
TSTTKMLSC

SEQ ID NO: 45114 - protein, 9 aa, Artificial Sequence
  Description of Artificial Sequence: Synthetic peptide
TANATVFHS

SEQ ID NO: 45115 - protein, 9 aa, Artificial Sequence
  Description of Artificial Sequence: Synthetic peptide
TCEQEWKAR

SEQ ID NO: 45116 - protein, 9 aa, Artificial Sequence
  Description of Artificial Sequence: Synthetic peptide
SAMPGASMN

SEQ ID NO: 45117 - protein, 9 aa, Artificial Sequence
  Description of Artificial Sequence: Synthetic peptide
GASYANNVV

SEQ ID NO: 45118 - protein, 9 aa, Artificial Sequence
  Description of Artificial Sequence: Synthetic peptide
AAFTHMGTF

SEQ ID NO: 45119 - protein, 9 aa, Artificial Sequence
  Description of Artificial Sequence: Synthetic peptide
AVKNWEVHE

SEQ ID NO: 45120 - protein, 9 aa, Artificial Sequence
  Description of Artificial Sequence: Synthetic peptide
VASFWHCGA

SEQ ID NO: 45121 - protein, 9 aa, Artificial Sequence
  Description of Artificial Sequence: Synthetic peptide
AIYPTNFVK

SEQ ID NO: 45122 - protein, 9 aa, Artificial Sequence
  Description of Artificial Sequence: Synthetic peptide
NPALHNQCQ

SEQ ID NO: 45123 - protein, 9 aa, Artificial Sequence
  Description of Artificial Sequence: Synthetic peptide
QKMAVCDMP

SEQ ID NO: 45124 - protein, 9 aa, Artificial Sequence
  Description of Artificial Sequence: Synthetic peptide
KLHQPTWAA

SEQ ID NO: 45125 - protein, 9 aa, Artificial Sequence
  Description of Artificial Sequence: Synthetic peptide
SAKYHMDVE

SEQ ID NO: 45126 - protein, 9 aa, Artificial Sequence
  Description of Artificial Sequence: Synthetic peptide
QCVANYIAR

SEQ ID NO: 45127 - protein, 9 aa, Artificial Sequence
  Description of Artificial Sequence: Synthetic peptide
GWHVQSCAM

SEQ ID NO: 45128 - protein, 9 aa, Artificial Sequence
  Description of Artificial Sequence: Synthetic peptide
VPITCYNHG

SEQ ID NO: 45129 - protein, 9 aa, Artificial Sequence
  Description of Artificial Sequence: Synthetic peptide
DKQPHNTGF

SEQ ID NO: 45130 - protein, 9 aa, Artificial Sequence
  Description of Artificial Sequence: Synthetic peptide
AQNGMAICE

SEQ ID NO: 45131 - protein, 9 aa, Artificial Sequence
  Description of Artificial Sequence: Synthetic peptide
VLFQTMVED

SEQ ID NO: 45132 - protein, 9 aa, Artificial Sequence
  Description of Artificial Sequence: Synthetic peptide
TRKAVCQPV

SEQ ID NO: 45133 - protein, 9 aa, Artificial Sequence
  Description of Artificial Sequence: Synthetic peptide
VALKMFCTY

SEQ ID NO: 45134 - protein, 9 aa, Artificial Sequence
  Description of Artificial Sequence: Synthetic peptide
GANTEVLAG

SEQ ID NO: 45135 - protein, 9 aa, Artificial Sequence
  Description of Artificial Sequence: Synthetic peptide
MGAVTMVGS

SEQ ID NO: 45136 - protein, 9 aa, Artificial Sequence
  Description of Artificial Sequence: Synthetic peptide
MSYLKTTCH

SEQ ID NO: 45137 - protein, 9 aa, Artificial Sequence
  Description of Artificial Sequence: Synthetic peptide
TMGLHQDHP

SEQ ID NO: 45138 - protein, 9 aa, Artificial Sequence
  Description of Artificial Sequence: Synthetic peptide
LMHPLGTCA

SEQ ID NO: 45139 - protein, 9 aa, Artificial Sequence
  Description of Artificial Sequence: Synthetic peptide
TMGLAGKSA

SEQ ID NO: 45140 - protein, 9 aa, Artificial Sequence
  Description of Artificial Sequence: Synthetic peptide
YGQHWNPLT

SEQ ID NO: 45141 - protein, 9 aa, Artificial Sequence
  Description of Artificial Sequence: Synthetic peptide
ACYQLPSAN

SEQ ID NO: 45142 - protein, 9 aa, Artificial Sequence
  Description of Artificial Sequence: Synthetic peptide
ATKEKHPFY

SEQ ID NO: 45143 - protein, 9 aa, Artificial Sequence
  Description of Artificial Sequence: Synthetic peptide
MMKNTQFCE

SEQ ID NO: 45144 - protein, 9 aa, Artificial Sequence
  Description of Artificial Sequence: Synthetic peptide
KTNFRCEYY

SEQ ID NO: 45145 - protein, 9 aa, Artificial Sequence
  Description of Artificial Sequence: Synthetic peptide
MVAKEIDGP

SEQ ID NO: 45146 - protein, 9 aa, Artificial Sequence
  Description of Artificial Sequence: Synthetic peptide
MGSLQNMEF

SEQ ID NO: 45147 - protein, 9 aa, Artificial Sequence
  Description of Artificial Sequence: Synthetic peptide
RAQPQERVV

SEQ ID NO: 45148 - protein, 9 aa, Artificial Sequence
  Description of Artificial Sequence: Synthetic peptide
TKAECMPYQ

SEQ ID NO: 45149 - protein, 9 aa, Artificial Sequence
  Description of Artificial Sequence: Synthetic peptide
VAMFNRLDR

SEQ ID NO: 45150 - protein, 9 aa, Artificial Sequence
  Description of Artificial Sequence: Synthetic peptide
KAHDVLSNP

SEQ ID NO: 45151 - protein, 9 aa, Artificial Sequence
  Description of Artificial Sequence: Synthetic peptide
VTNLLMRAS

SEQ ID NO: 45152 - protein, 9 aa, Artificial Sequence
  Description of Artificial Sequence: Synthetic peptide
VGWACQAFY

SEQ ID NO: 45153 - protein, 9 aa, Artificial Sequence
  Description of Artificial Sequence: Synthetic peptide
MTNSSHKWS

SEQ ID NO: 45154 - protein, 9 aa, Artificial Sequence
  Description of Artificial Sequence: Synthetic peptide
KAAWSEDGR

SEQ ID NO: 45155 - protein, 9 aa, Artificial Sequence
  Description of Artificial Sequence: Synthetic peptide
ASGLYYSHG

SEQ ID NO: 45156 - protein, 9 aa, Artificial Sequence
  Description of Artificial Sequence: Synthetic peptide
MTGLQRVAV

SEQ ID NO: 45157 - protein, 9 aa, Artificial Sequence
  Description of Artificial Sequence: Synthetic peptide
KPSTKMTLR

SEQ ID NO: 45158 - protein, 9 aa, Artificial Sequence
  Description of Artificial Sequence: Synthetic peptide
IATKIRGFY

SEQ ID NO: 45159 - protein, 9 aa, Artificial Sequence
  Description of Artificial Sequence: Synthetic peptide
ARGVLNLED

SEQ ID NO: 45160 - protein, 9 aa, Artificial Sequence
  Description of Artificial Sequence: Synthetic peptide
FMNMMGSCS

SEQ ID NO: 45161 - protein, 9 aa, Artificial Sequence
  Description of Artificial Sequence: Synthetic peptide
FAHQHPGCP

SEQ ID NO: 45162 - protein, 9 aa, Artificial Sequence
  Description of Artificial Sequence: Synthetic peptide
NCVSLAAHW

SEQ ID NO: 45163 - protein, 9 aa, Artificial Sequence
  Description of Artificial Sequence: Synthetic peptide
DSMRCTPVP

SEQ ID NO: 45164 - protein, 9 aa, Artificial Sequence
  Description of Artificial Sequence: Synthetic peptide
FDRLITQGE

SEQ ID NO: 45165 - protein, 9 aa, Artificial Sequence
  Description of Artificial Sequence: Synthetic peptide
TGLADQDWW

SEQ ID NO: 45166 - protein, 9 aa, Artificial Sequence
  Description of Artificial Sequence: Synthetic peptide
NSIASKKSM

SEQ ID NO: 45167 - protein, 9 aa, Artificial Sequence
  Description of Artificial Sequence: Synthetic peptide
MFYYAFTCG

SEQ ID NO: 45168 - protein, 9 aa, Artificial Sequence
  Description of Artificial Sequence: Synthetic peptide
NSMVGGMSE

SEQ ID NO: 45169 - protein, 9 aa, Artificial Sequence
  Description of Artificial Sequence: Synthetic peptide
LVIPWARVE

SEQ ID NO: 45170 - protein, 9 aa, Artificial Sequence
  Description of Artificial Sequence: Synthetic peptide
FAAMACDMT

SEQ ID NO: 45171 - protein, 9 aa, Artificial Sequence
  Description of Artificial Sequence: Synthetic peptide
NSTSIFDAC

SEQ ID NO: 45172 - protein, 9 aa, Artificial Sequence
  Description of Artificial Sequence: Synthetic peptide
IAAHVVMCD

SEQ ID NO: 45173 - protein, 9 aa, Artificial Sequence
  Description of Artificial Sequence: Synthetic peptide
SAVPVCSCI

SEQ ID NO: 45174 - protein, 9 aa, Artificial Sequence
  Description of Artificial Sequence: Synthetic peptide
NKNSTNQWE

SEQ ID NO: 45175 - protein, 9 aa, Artificial Sequence
  Description of Artificial Sequence: Synthetic peptide
TRFEYWSNS

SEQ ID NO: 45176 - protein, 9 aa, Artificial Sequence
  Description of Artificial Sequence: Synthetic peptide
QMTMWANFY

SEQ ID NO: 45177 - protein, 9 aa, Artificial Sequence
  Description of Artificial Sequence: Synthetic peptide
SPNPLPWCD

SEQ ID NO: 45178 - protein, 9 aa, Artificial Sequence
  Description of Artificial Sequence: Synthetic peptide
KAINPLKAT

SEQ ID NO: 45179 - protein, 9 aa, Artificial Sequence
  Description of Artificial Sequence: Synthetic peptide
SVSIFKGSN

SEQ ID NO: 45180 - protein, 9 aa, Artificial Sequence
  Description of Artificial Sequence: Synthetic peptide
GNYISSMAC

SEQ ID NO: 45181 - protein, 9 aa, Artificial Sequence
  Description of Artificial Sequence: Synthetic peptide
YATTTMSML

SEQ ID NO: 45182 - protein, 9 aa, Artificial Sequence
  Description of Artificial Sequence: Synthetic peptide
KVHTCGMNY

SEQ ID NO: 45183 - protein, 9 aa, Artificial Sequence
  Description of Artificial Sequence: Synthetic peptide
NWNMWLKSL

SEQ ID NO: 45184 - protein, 9 aa, Artificial Sequence
  Description of Artificial Sequence: Synthetic peptide
FAAITRFQS

SEQ ID NO: 45185 - protein, 9 aa, Artificial Sequence
  Description of Artificial Sequence: Synthetic peptide
SVTAKNLCL

SEQ ID NO: 45186 - protein, 9 aa, Artificial Sequence
  Description of Artificial Sequence: Synthetic peptide
VCTICPVQM

SEQ ID NO: 45187 - protein, 9 aa, Artificial Sequence
  Description of Artificial Sequence: Synthetic peptide
NIKLTHFEM

SEQ ID NO: 45188 - protein, 9 aa, Artificial Sequence
  Description of Artificial Sequence: Synthetic peptide
VTQISCVDT

SEQ ID NO: 45189 - protein, 9 aa, Artificial Sequence
  Description of Artificial Sequence: Synthetic peptide
GAGMEASMD

SEQ ID NO: 45190 - protein, 9 aa, Artificial Sequence
  Description of Artificial Sequence: Synthetic peptide
AAVSVHKCL

SEQ ID NO: 45191 - protein, 9 aa, Artificial Sequence
  Description of Artificial Sequence: Synthetic peptide
TAALWKIEC

SEQ ID NO: 45192 - protein, 9 aa, Artificial Sequence
  Description of Artificial Sequence: Synthetic peptide
TGQPYYNTA

SEQ ID NO: 45193 - protein, 9 aa, Artificial Sequence
  Description of Artificial Sequence: Synthetic peptide
AILPCSTPK

SEQ ID NO: 45194 - protein, 9 aa, Artificial Sequence
  Description of Artificial Sequence: Synthetic peptide
EKQVYIVRN

SEQ ID NO: 45195 - protein, 9 aa, Artificial Sequence
  Description of Artificial Sequence: Synthetic peptide
MAKPAHAED

SEQ ID NO: 45196 - protein, 9 aa, Artificial Sequence
  Description of Artificial Sequence: Synthetic peptide
KVHEASYFP

SEQ ID NO: 45197 - protein, 9 aa, Artificial Sequence
  Description of Artificial Sequence: Synthetic peptide
VMIKTWASL

SEQ ID NO: 45198 - protein, 9 aa, Artificial Sequence
  Description of Artificial Sequence: Synthetic peptide
HSATAVREG

SEQ ID NO: 45199 - protein, 9 aa, Artificial Sequence
  Description of Artificial Sequence: Synthetic peptide
GQIFMCQHI

SEQ ID NO: 45200 - protein, 9 aa, Artificial Sequence
  Description of Artificial Sequence: Synthetic peptide
AVSLHEHLQ

SEQ ID NO: 45201 - protein, 9 aa, Artificial Sequence
  Description of Artificial Sequence: Synthetic peptide
AAMPVMKCW

SEQ ID NO: 45202 - protein, 9 aa, Artificial Sequence
  Description of Artificial Sequence: Synthetic peptide
LGAMMALHC

SEQ ID NO: 45203 - protein, 9 aa, Artificial Sequence
  Description of Artificial Sequence: Synthetic peptide
RCGLSSDAT

SEQ ID NO: 45204 - protein, 9 aa, Artificial Sequence
  Description of Artificial Sequence: Synthetic peptide
LALQIQENR

SEQ ID NO: 45205 - protein, 9 aa, Artificial Sequence
  Description of Artificial Sequence: Synthetic peptide
TARTPNDFE

SEQ ID NO: 45206 - protein, 9 aa, Artificial Sequence
  Description of Artificial Sequence: Synthetic peptide
MGTFKLDFN

SEQ ID NO: 45207 - protein, 9 aa, Artificial Sequence
  Description of Artificial Sequence: Synthetic peptide
TSTRANMLC

SEQ ID NO: 45208 - protein, 9 aa, Artificial Sequence
  Description of Artificial Sequence: Synthetic peptide
AFKLVSCLE

SEQ ID NO: 45209 - protein, 9 aa, Artificial Sequence
  Description of Artificial Sequence: Synthetic peptide
ISLPCHEVK

SEQ ID NO: 45210 - protein, 9 aa, Artificial Sequence
  Description of Artificial Sequence: Synthetic peptide
EKGYIFVID

SEQ ID NO: 45211 - protein, 9 aa, Artificial Sequence
  Description of Artificial Sequence: Synthetic peptide
TTSVLTGTG

SEQ ID NO: 45212 - protein, 9 aa, Artificial Sequence
  Description of Artificial Sequence: Synthetic peptide
FARQFMEYW

SEQ ID NO: 45213 - protein, 9 aa, Artificial Sequence
  Description of Artificial Sequence: Synthetic peptide
FGHFVGLTG

SEQ ID NO: 45214 - protein, 9 aa, Artificial Sequence
  Description of Artificial Sequence: Synthetic peptide
STMSIVRTP

SEQ ID NO: 45215 - protein, 9 aa, Artificial Sequence
  Description of Artificial Sequence: Synthetic peptide
ASVTNVKGM

SEQ ID NO: 45216 - protein, 9 aa, Artificial Sequence
  Description of Artificial Sequence: Synthetic peptide
MSKLHAGIH

SEQ ID NO: 45217 - protein, 9 aa, Artificial Sequence
  Description of Artificial Sequence: Synthetic peptide
GIAFAVHGI

SEQ ID NO: 45218 - protein, 9 aa, Artificial Sequence
  Description of Artificial Sequence: Synthetic peptide
MFQTTILES

SEQ ID NO: 45219 - protein, 9 aa, Artificial Sequence
  Description of Artificial Sequence: Synthetic peptide
MAHSYQSFC

SEQ ID NO: 45220 - protein, 9 aa, Artificial Sequence
  Description of Artificial Sequence: Synthetic peptide
VTQMIANVQ

SEQ ID NO: 45221 - protein, 9 aa, Artificial Sequence
  Description of Artificial Sequence: Synthetic peptide
DRFTQQSAK

SEQ ID NO: 45222 - protein, 9 aa, Artificial Sequence
  Description of Artificial Sequence: Synthetic peptide
VQKYVTQAF

SEQ ID NO: 45223 - protein, 9 aa, Artificial Sequence
  Description of Artificial Sequence: Synthetic peptide
SASTTRFIG

SEQ ID NO: 45224 - protein, 9 aa, Artificial Sequence
  Description of Artificial Sequence: Synthetic peptide
VAATAYMDE

SEQ ID NO: 45225 - protein, 9 aa, Artificial Sequence
  Description of Artificial Sequence: Synthetic peptide
RGEHFKCSY

SEQ ID NO: 45226 - protein, 9 aa, Artificial Sequence
  Description of Artificial Sequence: Synthetic peptide
HSNMWLDQY

SEQ ID NO: 45227 - protein, 9 aa, Artificial Sequence
  Description of Artificial Sequence: Synthetic peptide
NKTSNIMYH

SEQ ID NO: 45228 - protein, 9 aa, Artificial Sequence
  Description of Artificial Sequence: Synthetic peptide
AAYSPMFWR

SEQ ID NO: 45229 - protein, 9 aa, Artificial Sequence
  Description of Artificial Sequence: Synthetic peptide
SVMPCVDAY

SEQ ID NO: 45230 - protein, 9 aa, Artificial Sequence
  Description of Artificial Sequence: Synthetic peptide
TAVPILDWT

SEQ ID NO: 45231 - protein, 9 aa, Artificial Sequence
  Description of Artificial Sequence: Synthetic peptide
SGMLFIYSG

SEQ ID NO: 45232 - protein, 9 aa, Artificial Sequence
  Description of Artificial Sequence: Synthetic peptide
NRLTIHTWY

SEQ ID NO: 45233 - protein, 9 aa, Artificial Sequence
  Description of Artificial Sequence: Synthetic peptide
VAVITQQYP

SEQ ID NO: 45234 - protein, 9 aa, Artificial Sequence
  Description of Artificial Sequence: Synthetic peptide
NSRLIRPHG

SEQ ID NO: 45235 - protein, 9 aa, Artificial Sequence
  Description of Artificial Sequence: Synthetic peptide
RTIHPMRFI

SEQ ID NO: 45236 - protein, 9 aa, Artificial Sequence
  Description of Artificial Sequence: Synthetic peptide
SKFEFQNAA

SEQ ID NO: 45237 - protein, 9 aa, Artificial Sequence
  Description of Artificial Sequence: Synthetic peptide
MGRPVPSHS

SEQ ID NO: 45238 - protein, 9 aa, Artificial Sequence
  Description of Artificial Sequence: Synthetic peptide
MAHNLVSLS

SEQ ID NO: 45239 - protein, 9 aa, Artificial Sequence
  Description of Artificial Sequence: Synthetic peptide
KMMCNPTLL

SEQ ID NO: 45240 - protein, 9 aa, Artificial Sequence
  Description of Artificial Sequence: Synthetic peptide
NIKLTHCNF

SEQ ID NO: 45241 - protein, 9 aa, Artificial Sequence
  Description of Artificial Sequence: Synthetic peptide
AASSWVLME

SEQ ID NO: 45242 - protein, 9 aa, Artificial Sequence
  Description of Artificial Sequence: Synthetic peptide
MCLQPYNCY

SEQ ID NO: 45243 - protein, 9 aa, Artificial Sequence
  Description of Artificial Sequence: Synthetic peptide
VTHSTPQCV

SEQ ID NO: 45244 - protein, 9 aa, Artificial Sequence
  Description of Artificial Sequence: Synthetic peptide
TSKVVSDAP

SEQ ID NO: 45245 - protein, 9 aa, Artificial Sequence
  Description of Artificial Sequence: Synthetic peptide
ASSIVFTAA

SEQ ID NO: 45246 - protein, 9 aa, Artificial Sequence
  Description of Artificial Sequence: Synthetic peptide
KLHSGGYLC

SEQ ID NO: 45247 - protein, 9 aa, Artificial Sequence
  Description of Artificial Sequence: Synthetic peptide
TAGIIYFYH

SEQ ID NO: 45248 - protein, 9 aa, Artificial Sequence
  Description of Artificial Sequence: Synthetic peptide
SGKQLQNTY

SEQ ID NO: 45249 - protein, 9 aa, Artificial Sequence
  Description of Artificial Sequence: Synthetic peptide
RFTMYSEWL

SEQ ID NO: 45250 - protein, 9 aa, Artificial Sequence
  Description of Artificial Sequence: Synthetic peptide
TSRPISHEI

SEQ ID NO: 45251 - protein, 9 aa, Artificial Sequence
  Description of Artificial Sequence: Synthetic peptide
SGMLKPMYS

SEQ ID NO: 45252 - protein, 9 aa, Artificial Sequence
  Description of Artificial Sequence: Synthetic peptide
RTTMGVKME

SEQ ID NO: 45253 - protein, 9 aa, Artificial Sequence
  Description of Artificial Sequence: Synthetic peptide
TCLTRHSQG

SEQ ID NO: 45254 - protein, 9 aa, Artificial Sequence
  Description of Artificial Sequence: Synthetic peptide
MADKKWRYC

SEQ ID NO: 45255 - protein, 9 aa, Artificial Sequence
  Description of Artificial Sequence: Synthetic peptide
SFYIHQEAN

SEQ ID NO: 45256 - protein, 9 aa, Artificial Sequence
  Description of Artificial Sequence: Synthetic peptide
ASYMKSELA

SEQ ID NO: 45257 - protein, 9 aa, Artificial Sequence
  Description of Artificial Sequence: Synthetic peptide
SYTRAVECN

SEQ ID NO: 45258 - protein, 9 aa, Artificial Sequence
  Description of Artificial Sequence: Synthetic peptide
SVQMEGLGW

SEQ ID NO: 45259 - protein, 9 aa, Artificial Sequence
  Description of Artificial Sequence: Synthetic peptide
GTKHTMQQC

SEQ ID NO: 45260 - protein, 9 aa, Artificial Sequence
  Description of Artificial Sequence: Synthetic peptide
TSQHLQVLC

SEQ ID NO: 45261 - protein, 9 aa, Artificial Sequence
  Description of Artificial Sequence: Synthetic peptide
MHNRIQKGG

SEQ ID NO: 45262 - protein, 9 aa, Artificial Sequence
  Description of Artificial Sequence: Synthetic peptide
VIKSYVSTA

SEQ ID NO: 45263 - protein, 9 aa, Artificial Sequence
  Description of Artificial Sequence: Synthetic peptide
RLQYAGQFL

SEQ ID NO: 45264 - protein, 9 aa, Artificial Sequence
  Description of Artificial Sequence: Synthetic peptide
DKQFIAEWP

SEQ ID NO: 45265 - protein, 9 aa, Artificial Sequence
  Description of Artificial Sequence: Synthetic peptide
SHEHCMKMC

SEQ ID NO: 45266 - protein, 9 aa, Artificial Sequence
  Description of Artificial Sequence: Synthetic peptide
KTEDYQHHQ

SEQ ID NO: 45267 - protein, 9 aa, Artificial Sequence
  Description of Artificial Sequence: Synthetic peptide
AVYMAGRYM

SEQ ID NO: 45268 - protein, 9 aa, Artificial Sequence
  Description of Artificial Sequence: Synthetic peptide
GATPLCDAN

SEQ ID NO: 45269 - protein, 9 aa, Artificial Sequence
  Description of Artificial Sequence: Synthetic peptide
GAYHVTNQT

SEQ ID NO: 45270 - protein, 9 aa, Artificial Sequence
  Description of Artificial Sequence: Synthetic peptide
SHQHHPWGA

SEQ ID NO: 45271 - protein, 9 aa, Artificial Sequence
  Description of Artificial Sequence: Synthetic peptide
GATIVMTGH

SEQ ID NO: 45272 - protein, 9 aa, Artificial Sequence
  Description of Artificial Sequence: Synthetic peptide
TAVAQVDPV

SEQ ID NO: 45273 - protein, 9 aa, Artificial Sequence
  Description of Artificial Sequence: Synthetic peptide
TARNLMGSS

SEQ ID NO: 45274 - protein, 9 aa, Artificial Sequence
  Description of Artificial Sequence: Synthetic peptide
KGNHKMKHE

SEQ ID NO: 45275 - protein, 9 aa, Artificial Sequence
  Description of Artificial Sequence: Synthetic peptide
RIEDTRHNN

SEQ ID NO: 45276 - protein, 9 aa, Artificial Sequence
  Description of Artificial Sequence: Synthetic peptide
MCHQWMSCT

SEQ ID NO: 45277 - protein, 9 aa, Artificial Sequence
  Description of Artificial Sequence: Synthetic peptide
STHYKIWAG

SEQ ID NO: 45278 - protein, 9 aa, Artificial Sequence
  Description of Artificial Sequence: Synthetic peptide
TMKAMMEVP

SEQ ID NO: 45279 - protein, 9 aa, Artificial Sequence
  Description of Artificial Sequence: Synthetic peptide
ALAHEAGKR

SEQ ID NO: 45280 - protein, 9 aa, Artificial Sequence
  Description of Artificial Sequence: Synthetic peptide
SSNIIQYHE

SEQ ID NO: 45281 - protein, 9 aa, Artificial Sequence
  Description of Artificial Sequence: Synthetic peptide
TQKSGSFNN

SEQ ID NO: 45282 - protein, 9 aa, Artificial Sequence
  Description of Artificial Sequence: Synthetic peptide
ALKLAQSHY

SEQ ID NO: 45283 - protein, 9 aa, Artificial Sequence
  Description of Artificial Sequence: Synthetic peptide
VCSHFCNEQ

SEQ ID NO: 45284 - protein, 9 aa, Artificial Sequence
  Description of Artificial Sequence: Synthetic peptide
MSAWKMRDR

SEQ ID NO: 45285 - protein, 9 aa, Artificial Sequence
  Description of Artificial Sequence: Synthetic peptide
TVTVWPVCC

SEQ ID NO: 45286 - protein, 9 aa, Artificial Sequence
  Description of Artificial Sequence: Synthetic peptide
NSKHLNTYV

SEQ ID NO: 45287 - protein, 9 aa, Artificial Sequence
  Description of Artificial Sequence: Synthetic peptide
VSHWITKVR

SEQ ID NO: 45288 - protein, 9 aa, Artificial Sequence
  Description of Artificial Sequence: Synthetic peptide
TSMPYKAYG

SEQ ID NO: 45289 - protein, 9 aa, Artificial Sequence
  Description of Artificial Sequence: Synthetic peptide
VYLQHNCCW

SEQ ID NO: 45290 - protein, 9 aa, Artificial Sequence
  Description of Artificial Sequence: Synthetic peptide
AANVGMLGS

SEQ ID NO: 45291 - protein, 9 aa, Artificial Sequence
  Description of Artificial Sequence: Synthetic peptide
KLQMNYEEK

SEQ ID NO: 45292 - protein, 9 aa, Artificial Sequence
  Description of Artificial Sequence: Synthetic peptide
LGGFHVSAS

SEQ ID NO: 45293 - protein, 9 aa, Artificial Sequence
  Description of Artificial Sequence: Synthetic peptide
GATFLQFDG

SEQ ID NO: 45294 - protein, 9 aa, Artificial Sequence
  Description of Artificial Sequence: Synthetic peptide
SQMLSEHLE

SEQ ID NO: 45295 - protein, 9 aa, Artificial Sequence
  Description of Artificial Sequence: Synthetic peptide
TPGWVNQIA

SEQ ID NO: 45296 - protein, 9 aa, Artificial Sequence
  Description of Artificial Sequence: Synthetic peptide
TGTFVQMDK

SEQ ID NO: 45297 - protein, 9 aa, Artificial Sequence
  Description of Artificial Sequence: Synthetic peptide
ATKQTPWAI

SEQ ID NO: 45298 - protein, 9 aa, Artificial Sequence
  Description of Artificial Sequence: Synthetic peptide
TMCHEMCSL

SEQ ID NO: 45299 - protein, 9 aa, Artificial Sequence
  Description of Artificial Sequence: Synthetic peptide
VGAACKMVA

SEQ ID NO: 45300 - protein, 9 aa, Artificial Sequence
  Description of Artificial Sequence: Synthetic peptide
GQVTMQRCC

SEQ ID NO: 45301 - protein, 9 aa, Artificial Sequence
  Description of Artificial Sequence: Synthetic peptide
TWTIKQIGE

SEQ ID NO: 45302 - protein, 9 aa, Artificial Sequence
  Description of Artificial Sequence: Synthetic peptide
SARQVLDPD

SEQ ID NO: 45303 - protein, 9 aa, Artificial Sequence
  Description of Artificial Sequence: Synthetic peptide
VSKSWLNSF

SEQ ID NO: 45304 - protein, 9 aa, Artificial Sequence
  Description of Artificial Sequence: Synthetic peptide
GGMFLAEGS

SEQ ID NO: 45305 - protein, 9 aa, Artificial Sequence
  Description of Artificial Sequence: Synthetic peptide
NYVTLGNHM

SEQ ID NO: 45306 - protein, 9 aa, Artificial Sequence
  Description of Artificial Sequence: Synthetic peptide
ISKHCHDQG

SEQ ID NO: 45307 - protein, 9 aa, Artificial Sequence
  Description of Artificial Sequence: Synthetic peptide
SAQSALDAL

SEQ ID NO: 45308 - protein, 9 aa, Artificial Sequence
  Description of Artificial Sequence: Synthetic peptide
FAHGHSKAR

SEQ ID NO: 45309 - protein, 9 aa, Artificial Sequence
  Description of Artificial Sequence: Synthetic peptide
AYFYLGAEF

SEQ ID NO: 45310 - protein, 9 aa, Artificial Sequence
  Description of Artificial Sequence: Synthetic peptide
QKTQHPVWN

SEQ ID NO: 45311 - protein, 9 aa, Artificial Sequence
  Description of Artificial Sequence: Synthetic peptide
NLCVSLESY

SEQ ID NO: 45312 - protein, 9 aa, Artificial Sequence
  Description of Artificial Sequence: Synthetic peptide
MSQRVSVPS

SEQ ID NO: 45313 - protein, 9 aa, Artificial Sequence
  Description of Artificial Sequence: Synthetic peptide
KEKLQMNHM

SEQ ID NO: 45314 - protein, 9 aa, Artificial Sequence
  Description of Artificial Sequence: Synthetic peptide
HKGFTALFQ

SEQ ID NO: 45315 - protein, 9 aa, Artificial Sequence
  Description of Artificial Sequence: Synthetic peptide
GTRTRIQQE

SEQ ID NO: 45316 - protein, 9 aa, Artificial Sequence
  Description of Artificial Sequence: Synthetic peptide
ACTNMFAYD

SEQ ID NO: 45317 - protein, 9 aa, Artificial Sequence
  Description of Artificial Sequence: Synthetic peptide
QSMHCANLK

SEQ ID NO: 45318 - protein, 9 aa, Artificial Sequence
  Description of Artificial Sequence: Synthetic peptide
LGSHYCNYA

SEQ ID NO: 45319 - protein, 9 aa, Artificial Sequence
  Description of Artificial Sequence: Synthetic peptide
VAMLEFQSA

SEQ ID NO: 45320 - protein, 9 aa, Artificial Sequence
  Description of Artificial Sequence: Synthetic peptide
SSHMLELHI

SEQ ID NO: 45321 - protein, 9 aa, Artificial Sequence
  Description of Artificial Sequence: Synthetic peptide
HGVIPMNWI

SEQ ID NO: 45322 - protein, 9 aa, Artificial Sequence
  Description of Artificial Sequence: Synthetic peptide
SGAKMAWVA

SEQ ID NO: 45323 - protein, 9 aa, Artificial Sequence
  Description of Artificial Sequence: Synthetic peptide
SQWMLPCGE

SEQ ID NO: 45324 - protein, 9 aa, Artificial Sequence
  Description of Artificial Sequence: Synthetic peptide
MPTHMWDAP

SEQ ID NO: 45325 - protein, 9 aa, Artificial Sequence
  Description of Artificial Sequence: Synthetic peptide
NVMMQTYSR

SEQ ID NO: 45326 - protein, 9 aa, Artificial Sequence
  Description of Artificial Sequence: Synthetic peptide
TCQGIGSVT

SEQ ID NO: 45327 - protein, 9 aa, Artificial Sequence
  Description of Artificial Sequence: Synthetic peptide
TCRVAEFVP

SEQ ID NO: 45328 - protein, 9 aa, Artificial Sequence
  Description of Artificial Sequence: Synthetic peptide
MGVMLTSEW

SEQ ID NO: 45329 - protein, 9 aa, Artificial Sequence
  Description of Artificial Sequence: Synthetic peptide
AQNLYSAFW

SEQ ID NO: 45330 - protein, 9 aa, Artificial Sequence
  Description of Artificial Sequence: Synthetic peptide
NHQLTYCSG

SEQ ID NO: 45331 - protein, 9 aa, Artificial Sequence
  Description of Artificial Sequence: Synthetic peptide
MIKLRHWDV

SEQ ID NO: 45332 - protein, 9 aa, Artificial Sequence
  Description of Artificial Sequence: Synthetic peptide
HCGPCLKGD

SEQ ID NO: 45333 - protein, 9 aa, Artificial Sequence
  Description of Artificial Sequence: Synthetic peptide
AAQYQAIGV

SEQ ID NO: 45334 - protein, 9 aa, Artificial Sequence
  Description of Artificial Sequence: Synthetic peptide
TNKMVGHGH

SEQ ID NO: 45335 - protein, 9 aa, Artificial Sequence
  Description of Artificial Sequence: Synthetic peptide
RCGVQQGSN

SEQ ID NO: 45336 - protein, 9 aa, Artificial Sequence
  Description of Artificial Sequence: Synthetic peptide
TFMRNEWTY

SEQ ID NO: 45337 - protein, 9 aa, Artificial Sequence
  Description of Artificial Sequence: Synthetic peptide
AKYICQNYC

SEQ ID NO: 45338 - protein, 9 aa, Artificial Sequence
  Description of Artificial Sequence: Synthetic peptide
GCARNNGAI

SEQ ID NO: 45339 - protein, 9 aa, Artificial Sequence
  Description of Artificial Sequence: Synthetic peptide
GCGKLEIHF

SEQ ID NO: 45340 - protein, 9 aa, Artificial Sequence
  Description of Artificial Sequence: Synthetic peptide
TAVQTHTGA

SEQ ID NO: 45341 - protein, 9 aa, Artificial Sequence
  Description of Artificial Sequence: Synthetic peptide
ARMPRESAD

SEQ ID NO: 45342 - protein, 9 aa, Artificial Sequence
  Description of Artificial Sequence: Synthetic peptide
VMIPRMGCG

SEQ ID NO: 45343 - protein, 9 aa, Artificial Sequence
  Description of Artificial Sequence: Synthetic peptide
YGYMANKMK

SEQ ID NO: 45344 - protein, 9 aa, Artificial Sequence
  Description of Artificial Sequence: Synthetic peptide
NSYTNFKGG

SEQ ID NO: 45345 - protein, 9 aa, Artificial Sequence
  Description of Artificial Sequence: Synthetic peptide
VLYSWWHFD

SEQ ID NO: 45346 - protein, 9 aa, Artificial Sequence
  Description of Artificial Sequence: Synthetic peptide
KCFEDLCST

SEQ ID NO: 45347 - protein, 9 aa, Artificial Sequence
  Description of Artificial Sequence: Synthetic peptide
VSNPMSCKK

SEQ ID NO: 45348 - protein, 9 aa, Artificial Sequence
  Description of Artificial Sequence: Synthetic peptide
SCQHFMDDP

SEQ ID NO: 45349 - protein, 9 aa, Artificial Sequence
  Description of Artificial Sequence: Synthetic peptide
VAAHWKMSN

SEQ ID NO: 45350 - protein, 9 aa, Artificial Sequence
  Description of Artificial Sequence: Synthetic peptide
AAVAMQMCE

SEQ ID NO: 45351 - protein, 9 aa, Artificial Sequence
  Description of Artificial Sequence: Synthetic peptide
ISQHCHCKL

SEQ ID NO: 45352 - protein, 9 aa, Artificial Sequence
  Description of Artificial Sequence: Synthetic peptide
QWKQAQCCT

SEQ ID NO: 45353 - protein, 9 aa, Artificial Sequence
  Description of Artificial Sequence: Synthetic peptide
GHRSRLSGA

SEQ ID NO: 45354 - protein, 9 aa, Artificial Sequence
  Description of Artificial Sequence: Synthetic peptide
TCASLQSNQ

SEQ ID NO: 45355 - protein, 9 aa, Artificial Sequence
  Description of Artificial Sequence: Synthetic peptide
KSAQMYGES

SEQ ID NO: 45356 - protein, 9 aa, Artificial Sequence
  Description of Artificial Sequence: Synthetic peptide
RSATDYGNH

SEQ ID NO: 45357 - protein, 9 aa, Artificial Sequence
  Description of Artificial Sequence: Synthetic peptide
ASGTKWAHK

SEQ ID NO: 45358 - protein, 9 aa, Artificial Sequence
  Description of Artificial Sequence: Synthetic peptide
SPVTLHNGE

SEQ ID NO: 45359 - protein, 9 aa, Artificial Sequence
  Description of Artificial Sequence: Synthetic peptide
RKEFWIKFK

SEQ ID NO: 45360 - protein, 9 aa, Artificial Sequence
  Description of Artificial Sequence: Synthetic peptide
VAARYTAPN

SEQ ID NO: 45361 - protein, 9 aa, Artificial Sequence
  Description of Artificial Sequence: Synthetic peptide
AVKQTIYMP

SEQ ID NO: 45362 - protein, 9 aa, Artificial Sequence
  Description of Artificial Sequence: Synthetic peptide
FKILKPGLG

SEQ ID NO: 45363 - protein, 9 aa, Artificial Sequence
  Description of Artificial Sequence: Synthetic peptide
AAIPFACMG

SEQ ID NO: 45364 - protein, 9 aa, Artificial Sequence
  Description of Artificial Sequence: Synthetic peptide
MCRLWHDAW

SEQ ID NO: 45365 - protein, 9 aa, Artificial Sequence
  Description of Artificial Sequence: Synthetic peptide
AQKYILVGQ

SEQ ID NO: 45366 - protein, 9 aa, Artificial Sequence
  Description of Artificial Sequence: Synthetic peptide
IQIFCFWCG

SEQ ID NO: 45367 - protein, 9 aa, Artificial Sequence
  Description of Artificial Sequence: Synthetic peptide
NRKGQHVQL

SEQ ID NO: 45368 - protein, 9 aa, Artificial Sequence
  Description of Artificial Sequence: Synthetic peptide
TKKTCVTWG

SEQ ID NO: 45369 - protein, 9 aa, Artificial Sequence
  Description of Artificial Sequence: Synthetic peptide
TVNMWGADD

SEQ ID NO: 45370 - protein, 9 aa, Artificial Sequence
  Description of Artificial Sequence: Synthetic peptide
GFKPEMRMA

SEQ ID NO: 45371 - protein, 9 aa, Artificial Sequence
  Description of Artificial Sequence: Synthetic peptide
HRKHKFVPI

SEQ ID NO: 45372 - protein, 9 aa, Artificial Sequence
  Description of Artificial Sequence: Synthetic peptide
KLSWEEYVR

SEQ ID NO: 45373 - protein, 9 aa, Artificial Sequence
  Description of Artificial Sequence: Synthetic peptide
VIAQQGNAR

SEQ ID NO: 45374 - protein, 9 aa, Artificial Sequence
  Description of Artificial Sequence: Synthetic peptide
TTAHVYDGM

SEQ ID NO: 45375 - protein, 9 aa, Artificial Sequence
  Description of Artificial Sequence: Synthetic peptide
VKQMKLEQH

SEQ ID NO: 45376 - protein, 9 aa, Artificial Sequence
  Description of Artificial Sequence: Synthetic peptide
MCVMSQEHL

SEQ ID NO: 45377 - protein, 9 aa, Artificial Sequence
  Description of Artificial Sequence: Synthetic peptide
GRMQTSRCF

SEQ ID NO: 45378 - protein, 9 aa, Artificial Sequence
  Description of Artificial Sequence: Synthetic peptide
TMRGTGAQH

SEQ ID NO: 45379 - protein, 9 aa, Artificial Sequence
  Description of Artificial Sequence: Synthetic peptide
HYRPFWSAC

SEQ ID NO: 45380 - protein, 9 aa, Artificial Sequence
  Description of Artificial Sequence: Synthetic peptide
ELFMDHRSW

SEQ ID NO: 45381 - protein, 9 aa, Artificial Sequence
  Description of Artificial Sequence: Synthetic peptide
FSQPCVNGQ

SEQ ID NO: 45382 - protein, 9 aa, Artificial Sequence
  Description of Artificial Sequence: Synthetic peptide
RPFTNEGLC

SEQ ID NO: 45383 - protein, 9 aa, Artificial Sequence
  Description of Artificial Sequence: Synthetic peptide
VMSPFGKFC

SEQ ID NO: 45384 - protein, 9 aa, Artificial Sequence
  Description of Artificial Sequence: Synthetic peptide
TVKIYGEAS

SEQ ID NO: 45385 - protein, 9 aa, Artificial Sequence
  Description of Artificial Sequence: Synthetic peptide
AYRYEYCAI

SEQ ID NO: 45386 - protein, 9 aa, Artificial Sequence
  Description of Artificial Sequence: Synthetic peptide
IGTTWYGDT

SEQ ID NO: 45387 - protein, 9 aa, Artificial Sequence
  Description of Artificial Sequence: Synthetic peptide
ERARSHECT

SEQ ID NO: 45388 - protein, 9 aa, Artificial Sequence
  Description of Artificial Sequence: Synthetic peptide
KIESIVGVT

SEQ ID NO: 45389 - protein, 9 aa, Artificial Sequence
  Description of Artificial Sequence: Synthetic peptide
MGASNMRFV

SEQ ID NO: 45390 - protein, 9 aa, Artificial Sequence
  Description of Artificial Sequence: Synthetic peptide
VANYCNRPE

SEQ ID NO: 45391 - protein, 9 aa, Artificial Sequence
  Description of Artificial Sequence: Synthetic peptide
AGQTFIYVH

SEQ ID NO: 45392 - protein, 9 aa, Artificial Sequence
  Description of Artificial Sequence: Synthetic peptide
LAMMCHADQ

SEQ ID NO: 45393 - protein, 9 aa, Artificial Sequence
  Description of Artificial Sequence: Synthetic peptide
MHVMSGHLF

SEQ ID NO: 45394 - protein, 9 aa, Artificial Sequence
  Description of Artificial Sequence: Synthetic peptide
AMRQANAGV

SEQ ID NO: 45395 - protein, 9 aa, Artificial Sequence
  Description of Artificial Sequence: Synthetic peptide
QYSIWNFDH

SEQ ID NO: 45396 - protein, 9 aa, Artificial Sequence
  Description of Artificial Sequence: Synthetic peptide
TTHLGMNHF

SEQ ID NO: 45397 - protein, 9 aa, Artificial Sequence
  Description of Artificial Sequence: Synthetic peptide
MSLHKCDVR

SEQ ID NO: 45398 - protein, 9 aa, Artificial Sequence
  Description of Artificial Sequence: Synthetic peptide
NFAMSMRDH

SEQ ID NO: 45399 - protein, 9 aa, Artificial Sequence
  Description of Artificial Sequence: Synthetic peptide
MKYEKNSCW

SEQ ID NO: 45400 - protein, 9 aa, Artificial Sequence
  Description of Artificial Sequence: Synthetic peptide
GSSYLNQPT

SEQ ID NO: 45401 - protein, 9 aa, Artificial Sequence
  Description of Artificial Sequence: Synthetic peptide
MSRHCSMHD

SEQ ID NO: 45402 - protein, 9 aa, Artificial Sequence
  Description of Artificial Sequence: Synthetic peptide
MANATSREN

SEQ ID NO: 45403 - protein, 9 aa, Artificial Sequence
  Description of Artificial Sequence: Synthetic peptide
EAYRNKNVC

SEQ ID NO: 45404 - protein, 9 aa, Artificial Sequence
  Description of Artificial Sequence: Synthetic peptide
KNNTKKQWP

SEQ ID NO: 45405 - protein, 9 aa, Artificial Sequence
  Description of Artificial Sequence: Synthetic peptide
RVAFTLESF

SEQ ID NO: 45406 - protein, 9 aa, Artificial Sequence
  Description of Artificial Sequence: Synthetic peptide
AYKQIHDST

SEQ ID NO: 45407 - protein, 9 aa, Artificial Sequence
  Description of Artificial Sequence: Synthetic peptide
NATGAPRAW

SEQ ID NO: 45408 - protein, 9 aa, Artificial Sequence
  Description of Artificial Sequence: Synthetic peptide
MKHDVKEWN

SEQ ID NO: 45409 - protein, 9 aa, Artificial Sequence
  Description of Artificial Sequence: Synthetic peptide
FSTQQCCVE

SEQ ID NO: 45410 - protein, 9 aa, Artificial Sequence
  Description of Artificial Sequence: Synthetic peptide
EKKFHLKYQ

SEQ ID NO: 45411 - protein, 9 aa, Artificial Sequence
  Description of Artificial Sequence: Synthetic peptide
ALGQFATCD

SEQ ID NO: 45412 - protein, 9 aa, Artificial Sequence
  Description of Artificial Sequence: Synthetic peptide
GGFRFTAQA

SEQ ID NO: 45413 - protein, 9 aa, Artificial Sequence
  Description of Artificial Sequence: Synthetic peptide
IALSCQSHL

SEQ ID NO: 45414 - protein, 9 aa, Artificial Sequence
  Description of Artificial Sequence: Synthetic peptide
MSQFGMLAG

SEQ ID NO: 45415 - protein, 9 aa, Artificial Sequence
  Description of Artificial Sequence: Synthetic peptide
AMKFVNYFY

SEQ ID NO: 45416 - protein, 9 aa, Artificial Sequence
  Description of Artificial Sequence: Synthetic peptide
SMHLHMKDL

SEQ ID NO: 45417 - protein, 9 aa, Artificial Sequence
  Description of Artificial Sequence: Synthetic peptide
ISTLLSYCG

SEQ ID NO: 45418 - protein, 9 aa, Artificial Sequence
  Description of Artificial Sequence: Synthetic peptide
TEMSLPGME

SEQ ID NO: 45419 - protein, 9 aa, Artificial Sequence
  Description of Artificial Sequence: Synthetic peptide
NAKLGDACG

SEQ ID NO: 45420 - protein, 9 aa, Artificial Sequence
  Description of Artificial Sequence: Synthetic peptide
AMKKEGEWG

SEQ ID NO: 45421 - protein, 9 aa, Artificial Sequence
  Description of Artificial Sequence: Synthetic peptide
SAHSTAVYR

SEQ ID NO: 45422 - protein, 9 aa, Artificial Sequence
  Description of Artificial Sequence: Synthetic peptide
VTYSCVCTH

SEQ ID NO: 45423 - protein, 9 aa, Artificial Sequence
  Description of Artificial Sequence: Synthetic peptide
GSNWIYEEA

SEQ ID NO: 45424 - protein, 9 aa, Artificial Sequence
  Description of Artificial Sequence: Synthetic peptide
VSVIFPQQG

SEQ ID NO: 45425 - protein, 9 aa, Artificial Sequence
  Description of Artificial Sequence: Synthetic peptide
MVIREWCQC

SEQ ID NO: 45426 - protein, 9 aa, Artificial Sequence
  Description of Artificial Sequence: Synthetic peptide
MVMRQLFYN

SEQ ID NO: 45427 - protein, 9 aa, Artificial Sequence
  Description of Artificial Sequence: Synthetic peptide
VSYYMYEAP

SEQ ID NO: 45428 - protein, 9 aa, Artificial Sequence
  Description of Artificial Sequence: Synthetic peptide
CVIRAHQLC

SEQ ID NO: 45429 - protein, 9 aa, Artificial Sequence
  Description of Artificial Sequence: Synthetic peptide
YGAAKQAMA

SEQ ID NO: 45430 - protein, 9 aa, Artificial Sequence
  Description of Artificial Sequence: Synthetic peptide
AVTSSLRDL

SEQ ID NO: 45431 - protein, 9 aa, Artificial Sequence
  Description of Artificial Sequence: Synthetic peptide
TGQVQGFHY

SEQ ID NO: 45432 - protein, 9 aa, Artificial Sequence
  Description of Artificial Sequence: Synthetic peptide
DKLMFGEWC

SEQ ID NO: 45433 - protein, 9 aa, Artificial Sequence
  Description of Artificial Sequence: Synthetic peptide
AASLKPWMY

SEQ ID NO: 45434 - protein, 9 aa, Artificial Sequence
  Description of Artificial Sequence: Synthetic peptide
TRGLYMWSY

SEQ ID NO: 45435 - protein, 9 aa, Artificial Sequence
  Description of Artificial Sequence: Synthetic peptide
LSSRSEHPN

SEQ ID NO: 45436 - protein, 9 aa, Artificial Sequence
  Description of Artificial Sequence: Synthetic peptide
NASMYGAQC

SEQ ID NO: 45437 - protein, 9 aa, Artificial Sequence
  Description of Artificial Sequence: Synthetic peptide
SIFFFAASP

SEQ ID NO: 45438 - protein, 9 aa, Artificial Sequence
  Description of Artificial Sequence: Synthetic peptide
AFEKVNCPD

SEQ ID NO: 45439 - protein, 9 aa, Artificial Sequence
  Description of Artificial Sequence: Synthetic peptide
ILIFIQNCP

SEQ ID NO: 45440 - protein, 9 aa, Artificial Sequence
  Description of Artificial Sequence: Synthetic peptide
ASQRTHHVD

SEQ ID NO: 45441 - protein, 9 aa, Artificial Sequence
  Description of Artificial Sequence: Synthetic peptide
ATNLINKLF

SEQ ID NO: 45442 - protein, 9 aa, Artificial Sequence
  Description of Artificial Sequence: Synthetic peptide
EVLLGCQNY

SEQ ID NO: 45443 - protein, 9 aa, Artificial Sequence
  Description of Artificial Sequence: Synthetic peptide
FYMLSNQGS

SEQ ID NO: 45444 - protein, 9 aa, Artificial Sequence
  Description of Artificial Sequence: Synthetic peptide
GSVGMLDGQ

SEQ ID NO: 45445 - protein, 9 aa, Artificial Sequence
  Description of Artificial Sequence: Synthetic peptide
GVNIMFRQQ

SEQ ID NO: 45446 - protein, 9 aa, Artificial Sequence
  Description of Artificial Sequence: Synthetic peptide
KGEPGMNYY

SEQ ID NO: 45447 - protein, 9 aa, Artificial Sequence
  Description of Artificial Sequence: Synthetic peptide
KIAVYADWA

SEQ ID NO: 45448 - protein, 9 aa, Artificial Sequence
  Description of Artificial Sequence: Synthetic peptide
KNAWMDCVN

SEQ ID NO: 45449 - protein, 9 aa, Artificial Sequence
  Description of Artificial Sequence: Synthetic peptide
KNGAGDAHY

SEQ ID NO: 45450 - protein, 9 aa, Artificial Sequence
  Description of Artificial Sequence: Synthetic peptide
LAKMYWDMG

SEQ ID NO: 45451 - protein, 9 aa, Artificial Sequence
  Description of Artificial Sequence: Synthetic peptide
LTQSFQTYH

SEQ ID NO: 45452 - protein, 9 aa, Artificial Sequence
  Description of Artificial Sequence: Synthetic peptide
MIVQQSTGC

SEQ ID NO: 45453 - protein, 9 aa, Artificial Sequence
  Description of Artificial Sequence: Synthetic peptide
NRDYYRGNY

SEQ ID NO: 45454 - protein, 9 aa, Artificial Sequence
  Description of Artificial Sequence: Synthetic peptide
QAVQLWSHV

SEQ ID NO: 45455 - protein, 9 aa, Artificial Sequence
  Description of Artificial Sequence: Synthetic peptide
QCGSMQGVY

SEQ ID NO: 45456 - protein, 9 aa, Artificial Sequence
  Description of Artificial Sequence: Synthetic peptide
REAEYWRDQ

SEQ ID NO: 45457 - protein, 9 aa, Artificial Sequence
  Description of Artificial Sequence: Synthetic peptide
SSFYAQREG

SEQ ID NO: 45458 - protein, 9 aa, Artificial Sequence
  Description of Artificial Sequence: Synthetic peptide
VIISRHMDS

SEQ ID NO: 45459 - protein, 9 aa, Artificial Sequence
  Description of Artificial Sequence: Synthetic peptide
VTHLFGSQA

SEQ ID NO: 45460 - protein, 9 aa, Artificial Sequence
  Description of Artificial Sequence: Synthetic peptide
AAEAGIHQA

SEQ ID NO: 45461 - protein, 9 aa, Artificial Sequence
  Description of Artificial Sequence: Synthetic peptide
ACQSYWNEA

SEQ ID NO: 45462 - protein, 9 aa, Artificial Sequence
  Description of Artificial Sequence: Synthetic peptide
DATFCTYMR

SEQ ID NO: 45463 - protein, 9 aa, Artificial Sequence
  Description of Artificial Sequence: Synthetic peptide
DKTSRLADQ

SEQ ID NO: 45464 - protein, 9 aa, Artificial Sequence
  Description of Artificial Sequence: Synthetic peptide
KANMCEKIC

SEQ ID NO: 45465 - protein, 9 aa, Artificial Sequence
  Description of Artificial Sequence: Synthetic peptide
KPNNFDTQF

SEQ ID NO: 45466 - protein, 9 aa, Artificial Sequence
  Description of Artificial Sequence: Synthetic peptide
NINKFTCHE

SEQ ID NO: 45467 - protein, 9 aa, Artificial Sequence
  Description of Artificial Sequence: Synthetic peptide
NSAIEYQNE

SEQ ID NO: 45468 - protein, 9 aa, Artificial Sequence
  Description of Artificial Sequence: Synthetic peptide
QATPSEWEN

SEQ ID NO: 45469 - protein, 9 aa, Artificial Sequence
  Description of Artificial Sequence: Synthetic peptide
QSLMCWNMG

SEQ ID NO: 45470 - protein, 9 aa, Artificial Sequence
  Description of Artificial Sequence: Synthetic peptide
SARYQIEGC

SEQ ID NO: 45471 - protein, 9 aa, Artificial Sequence
  Description of Artificial Sequence: Synthetic peptide
SIVHSGLSF

SEQ ID NO: 45472 - protein, 9 aa, Artificial Sequence
  Description of Artificial Sequence: Synthetic peptide
TFYPTQNQH

SEQ ID NO: 45473 - protein, 9 aa, Artificial Sequence
  Description of Artificial Sequence: Synthetic peptide
TSNWLNFFP

SEQ ID NO: 45474 - protein, 9 aa, Artificial Sequence
  Description of Artificial Sequence: Synthetic peptide
VAAQSDTVN

SEQ ID NO: 45475 - protein, 9 aa, Artificial Sequence
  Description of Artificial Sequence: Synthetic peptide
VFKLISNQA

SEQ ID NO: 45476 - protein, 9 aa, Artificial Sequence
  Description of Artificial Sequence: Synthetic peptide
VVVRSNECA

SEQ ID NO: 45477 - protein, 9 aa, Artificial Sequence
  Description of Artificial Sequence: Synthetic peptide
YHNQDRHYL

SEQ ID NO: 45478 - protein, 9 aa, Artificial Sequence
  Description of Artificial Sequence: Synthetic peptide
HIKVEHEEV

SEQ ID NO: 45479 - protein, 9 aa, Artificial Sequence
  Description of Artificial Sequence: Synthetic peptide
ACASTSPNA

SEQ ID NO: 45480 - protein, 9 aa, Artificial Sequence
  Description of Artificial Sequence: Synthetic peptide
AHSRMDWTP

SEQ ID NO: 45481 - protein, 9 aa, Artificial Sequence
  Description of Artificial Sequence: Synthetic peptide
AIGRRRLTH

SEQ ID NO: 45482 - protein, 9 aa, Artificial Sequence
  Description of Artificial Sequence: Synthetic peptide
AKGHDKACC

SEQ ID NO: 45483 - protein, 9 aa, Artificial Sequence
  Description of Artificial Sequence: Synthetic peptide
AMGSLMRAS

SEQ ID NO: 45484 - protein, 9 aa, Artificial Sequence
  Description of Artificial Sequence: Synthetic peptide
ARNSMPFGM

SEQ ID NO: 45485 - protein, 9 aa, Artificial Sequence
  Description of Artificial Sequence: Synthetic peptide
CGTGEDCED

SEQ ID NO: 45486 - protein, 9 aa, Artificial Sequence
  Description of Artificial Sequence: Synthetic peptide
DKCNVTRAD

SEQ ID NO: 45487 - protein, 9 aa, Artificial Sequence
  Description of Artificial Sequence: Synthetic peptide
DMSDCYEHA

SEQ ID NO: 45488 - protein, 9 aa, Artificial Sequence
  Description of Artificial Sequence: Synthetic peptide
DNILRDVMA

SEQ ID NO: 45489 - protein, 9 aa, Artificial Sequence
  Description of Artificial Sequence: Synthetic peptide
DVANHITQM

SEQ ID NO: 45490 - protein, 9 aa, Artificial Sequence
  Description of Artificial Sequence: Synthetic peptide
DVDWNMGVE

SEQ ID NO: 45491 - protein, 9 aa, Artificial Sequence
  Description of Artificial Sequence: Synthetic peptide
DVNQYTMRH

SEQ ID NO: 45492 - protein, 9 aa, Artificial Sequence
  Description of Artificial Sequence: Synthetic peptide
DWRNKRNHA

SEQ ID NO: 45493 - protein, 9 aa, Artificial Sequence
  Description of Artificial Sequence: Synthetic peptide
DYVFWGFPC

SEQ ID NO: 45494 - protein, 9 aa, Artificial Sequence
  Description of Artificial Sequence: Synthetic peptide
EAAKLVEPT

SEQ ID NO: 45495 - protein, 9 aa, Artificial Sequence
  Description of Artificial Sequence: Synthetic peptide
ECHVCTHKA

SEQ ID NO: 45496 - protein, 9 aa, Artificial Sequence
  Description of Artificial Sequence: Synthetic peptide
ELPRYYGQM

SEQ ID NO: 45497 - protein, 9 aa, Artificial Sequence
  Description of Artificial Sequence: Synthetic peptide
ETHRRCKMS

SEQ ID NO: 45498 - protein, 9 aa, Artificial Sequence
  Description of Artificial Sequence: Synthetic peptide
FAKHCVMTA

SEQ ID NO: 45499 - protein, 9 aa, Artificial Sequence
  Description of Artificial Sequence: Synthetic peptide
FDEALWKNN

SEQ ID NO: 45500 - protein, 9 aa, Artificial Sequence
  Description of Artificial Sequence: Synthetic peptide
FTMRMASGF

SEQ ID NO: 45501 - protein, 9 aa, Artificial Sequence
  Description of Artificial Sequence: Synthetic peptide
GTHTQQWHH

SEQ ID NO: 45502 - protein, 9 aa, Artificial Sequence
  Description of Artificial Sequence: Synthetic peptide
HVFFAPLEG

SEQ ID NO: 45503 - protein, 9 aa, Artificial Sequence
  Description of Artificial Sequence: Synthetic peptide
HYMGLLCGC

SEQ ID NO: 45504 - protein, 9 aa, Artificial Sequence
  Description of Artificial Sequence: Synthetic peptide
IFDVYARWT

SEQ ID NO: 45505 - protein, 9 aa, Artificial Sequence
  Description of Artificial Sequence: Synthetic peptide
IHIGKNDNC

SEQ ID NO: 45506 - protein, 9 aa, Artificial Sequence
  Description of Artificial Sequence: Synthetic peptide
IHKFCFKGY

SEQ ID NO: 45507 - protein, 9 aa, Artificial Sequence
  Description of Artificial Sequence: Synthetic peptide
ISGFTKHEW

SEQ ID NO: 45508 - protein, 9 aa, Artificial Sequence
  Description of Artificial Sequence: Synthetic peptide
IVKQCYDCH

SEQ ID NO: 45509 - protein, 9 aa, Artificial Sequence
  Description of Artificial Sequence: Synthetic peptide
KAANDHHVA

SEQ ID NO: 45510 - protein, 9 aa, Artificial Sequence
  Description of Artificial Sequence: Synthetic peptide
KHVILRQLP

SEQ ID NO: 45511 - protein, 9 aa, Artificial Sequence
  Description of Artificial Sequence: Synthetic peptide
KIVSNESMT

SEQ ID NO: 45512 - protein, 9 aa, Artificial Sequence
  Description of Artificial Sequence: Synthetic peptide
KVDGCQKLC

SEQ ID NO: 45513 - protein, 9 aa, Artificial Sequence
  Description of Artificial Sequence: Synthetic peptide
LMYGVGTCF

SEQ ID NO: 45514 - protein, 9 aa, Artificial Sequence
  Description of Artificial Sequence: Synthetic peptide
LNNHHGTGS

SEQ ID NO: 45515 - protein, 9 aa, Artificial Sequence
  Description of Artificial Sequence: Synthetic peptide
MFQWRWIDG

SEQ ID NO: 45516 - protein, 9 aa, Artificial Sequence
  Description of Artificial Sequence: Synthetic peptide
MGFPKMSAW

SEQ ID NO: 45517 - protein, 9 aa, Artificial Sequence
  Description of Artificial Sequence: Synthetic peptide
MQVVLQHTS

SEQ ID NO: 45518 - protein, 9 aa, Artificial Sequence
  Description of Artificial Sequence: Synthetic peptide
MYYQIENDP

SEQ ID NO: 45519 - protein, 9 aa, Artificial Sequence
  Description of Artificial Sequence: Synthetic peptide
NSICMGGWK

SEQ ID NO: 45520 - protein, 9 aa, Artificial Sequence
  Description of Artificial Sequence: Synthetic peptide
NVCTKRENE

SEQ ID NO: 45521 - protein, 9 aa, Artificial Sequence
  Description of Artificial Sequence: Synthetic peptide
NYCKYNKMR

SEQ ID NO: 45522 - protein, 9 aa, Artificial Sequence
  Description of Artificial Sequence: Synthetic peptide
PESVKMDCN

SEQ ID NO: 45523 - protein, 9 aa, Artificial Sequence
  Description of Artificial Sequence: Synthetic peptide
QVYYVHTER

SEQ ID NO: 45524 - protein, 9 aa, Artificial Sequence
  Description of Artificial Sequence: Synthetic peptide
RASHDGCCD

SEQ ID NO: 45525 - protein, 9 aa, Artificial Sequence
  Description of Artificial Sequence: Synthetic peptide
RIFWDFHAT

SEQ ID NO: 45526 - protein, 9 aa, Artificial Sequence
  Description of Artificial Sequence: Synthetic peptide
RVPRCVYEC

SEQ ID NO: 45527 - protein, 9 aa, Artificial Sequence
  Description of Artificial Sequence: Synthetic peptide
TDALTDSMH

SEQ ID NO: 45528 - protein, 9 aa, Artificial Sequence
  Description of Artificial Sequence: Synthetic peptide
TEDDRWRHA

SEQ ID NO: 45529 - protein, 9 aa, Artificial Sequence
  Description of Artificial Sequence: Synthetic peptide
TIWERQSFH

SEQ ID NO: 45530 - protein, 9 aa, Artificial Sequence
  Description of Artificial Sequence: Synthetic peptide
TQGMYVESY

SEQ ID NO: 45531 - protein, 9 aa, Artificial Sequence
  Description of Artificial Sequence: Synthetic peptide
TSNIFQRHG

SEQ ID NO: 45532 - protein, 9 aa, Artificial Sequence
  Description of Artificial Sequence: Synthetic peptide
TVNVDSQYN

SEQ ID NO: 45533 - protein, 9 aa, Artificial Sequence
  Description of Artificial Sequence: Synthetic peptide
VASSHRESQ

SEQ ID NO: 45534 - protein, 9 aa, Artificial Sequence
  Description of Artificial Sequence: Synthetic peptide
VIKVNTVNP

SEQ ID NO: 45535 - protein, 9 aa, Artificial Sequence
  Description of Artificial Sequence: Synthetic peptide
VSGMLAACN

SEQ ID NO: 45536 - protein, 9 aa, Artificial Sequence
  Description of Artificial Sequence: Synthetic peptide
VVNVWGCAP

SEQ ID NO: 45537 - protein, 9 aa, Artificial Sequence
  Description of Artificial Sequence: Synthetic peptide
WNIVLMFYC

SEQ ID NO: 45538 - protein, 9 aa, Artificial Sequence
  Description of Artificial Sequence: Synthetic peptide
WWVVVPCFM

SEQ ID NO: 45539 - protein, 9 aa, Artificial Sequence
  Description of Artificial Sequence: Synthetic peptide
YCTGLGSMD

SEQ ID NO: 45540 - protein, 9 aa, Artificial Sequence
  Description of Artificial Sequence: Synthetic peptide
YFALNDITH

SEQ ID NO: 45541 - protein, 9 aa, Artificial Sequence
  Description of Artificial Sequence: Synthetic peptide
YNLQWFKHY

SEQ ID NO: 45542 - protein, 9 aa, Artificial Sequence
  Description of Artificial Sequence: Synthetic peptide
YSDNGRRFD

SEQ ID NO: 45543 - protein, 9 aa, Artificial Sequence
  Description of Artificial Sequence: Synthetic peptide
YSIIWRVYR

SEQ ID NO: 45544 - protein, 9 aa, Artificial Sequence
  Description of Artificial Sequence: Synthetic peptide
YSMDVMMSI

SEQ ID NO: 45545 - protein, 9 aa, Artificial Sequence
  Description of Artificial Sequence: Synthetic peptide
YVHKPPDQG

SEQ ID NO: 45546 - protein, 9 aa, Artificial Sequence
  Description of Artificial Sequence: Synthetic peptide
EVRSTRKNH

SEQ ID NO: 45547 - protein, 9 aa, Artificial Sequence
  Description of Artificial Sequence: Synthetic peptide
LDGPIGMGT

SEQ ID NO: 45548 - protein, 9 aa, Artificial Sequence
  Description of Artificial Sequence: Synthetic peptide
GAYSLHDWR

SEQ ID NO: 45549 - protein, 9 aa, Artificial Sequence
  Description of Artificial Sequence: Synthetic peptide
IMVERWQHA

SEQ ID NO: 45550 - protein, 9 aa, Artificial Sequence
  Description of Artificial Sequence: Synthetic peptide
MCDNFPSAH

SEQ ID NO: 45551 - protein, 9 aa, Artificial Sequence
  Description of Artificial Sequence: Synthetic peptide
NGMDKPVDA

SEQ ID NO: 45552 - protein, 9 aa, Artificial Sequence
  Description of Artificial Sequence: Synthetic peptide
AAWQSEIAN

SEQ ID NO: 45553 - protein, 9 aa, Artificial Sequence
  Description of Artificial Sequence: Synthetic peptide
ACILDGFTL

SEQ ID NO: 45554 - protein, 9 aa, Artificial Sequence
  Description of Artificial Sequence: Synthetic peptide
CAYNAPDWP

SEQ ID NO: 45555 - protein, 9 aa, Artificial Sequence
  Description of Artificial Sequence: Synthetic peptide
EFTPEHRCW

SEQ ID NO: 45556 - protein, 9 aa, Artificial Sequence
  Description of Artificial Sequence: Synthetic peptide
ETLKMYWEK

SEQ ID NO: 45557 - protein, 9 aa, Artificial Sequence
  Description of Artificial Sequence: Synthetic peptide
GFSPISSPC

SEQ ID NO: 45558 - protein, 9 aa, Artificial Sequence
  Description of Artificial Sequence: Synthetic peptide
GIDTISTSI

SEQ ID NO: 45559 - protein, 9 aa, Artificial Sequence
  Description of Artificial Sequence: Synthetic peptide
GSEWKTFGD

SEQ ID NO: 45560 - protein, 9 aa, Artificial Sequence
  Description of Artificial Sequence: Synthetic peptide
IMMCVWRSF

SEQ ID NO: 45561 - protein, 9 aa, Artificial Sequence
  Description of Artificial Sequence: Synthetic peptide
KAFDNELHN

SEQ ID NO: 45562 - protein, 9 aa, Artificial Sequence
  Description of Artificial Sequence: Synthetic peptide
KGEMEMSMA

SEQ ID NO: 45563 - protein, 9 aa, Artificial Sequence
  Description of Artificial Sequence: Synthetic peptide
KKCDTMIGQ

SEQ ID NO: 45564 - protein, 9 aa, Artificial Sequence
  Description of Artificial Sequence: Synthetic peptide
KMEHMWKMP

SEQ ID NO: 45565 - protein, 9 aa, Artificial Sequence
  Description of Artificial Sequence: Synthetic peptide
MNGFCFGEA

SEQ ID NO: 45566 - protein, 9 aa, Artificial Sequence
  Description of Artificial Sequence: Synthetic peptide
MVKQAQTMC

SEQ ID NO: 45567 - protein, 9 aa, Artificial Sequence
  Description of Artificial Sequence: Synthetic peptide
NGKQFESGP

SEQ ID NO: 45568 - protein, 9 aa, Artificial Sequence
  Description of Artificial Sequence: Synthetic peptide
NSASYCNPT

SEQ ID NO: 45569 - protein, 9 aa, Artificial Sequence
  Description of Artificial Sequence: Synthetic peptide
NTLVNMESP

SEQ ID NO: 45570 - protein, 9 aa, Artificial Sequence
  Description of Artificial Sequence: Synthetic peptide
TNSVMQNME

SEQ ID NO: 45571 - protein, 9 aa, Artificial Sequence
  Description of Artificial Sequence: Synthetic peptide
TTGPKHCSV

SEQ ID NO: 45572 - protein, 9 aa, Artificial Sequence
  Description of Artificial Sequence: Synthetic peptide
YSTYSEKSC

SEQ ID NO: 45573 - protein, 9 aa, Artificial Sequence
  Description of Artificial Sequence: Synthetic peptide
YVETTKVWP

SEQ ID NO: 45574 - protein, 9 aa, Artificial Sequence
  Description of Artificial Sequence: Synthetic peptide
TSERHSCMV

SEQ ID NO: 45575 - protein, 9 aa, Artificial Sequence
  Description of Artificial Sequence: Synthetic peptide
ATAFKMLNT

SEQ ID NO: 45576 - protein, 9 aa, Artificial Sequence
  Description of Artificial Sequence: Synthetic peptide
SPNGRGLCG

SEQ ID NO: 45577 - protein, 9 aa, Artificial Sequence
  Description of Artificial Sequence: Synthetic peptide
AACWTVPQH

SEQ ID NO: 45578 - protein, 9 aa, Artificial Sequence
  Description of Artificial Sequence: Synthetic peptide
AAESQGHRH

SEQ ID NO: 45579 - protein, 9 aa, Artificial Sequence
  Description of Artificial Sequence: Synthetic peptide
AAHCIPNHD

SEQ ID NO: 45580 - protein, 9 aa, Artificial Sequence
  Description of Artificial Sequence: Synthetic peptide
AAISSGFPA

SEQ ID NO: 45581 - protein, 9 aa, Artificial Sequence
  Description of Artificial Sequence: Synthetic peptide
AAKVFPDGM

SEQ ID NO: 45582 - protein, 9 aa, Artificial Sequence
  Description of Artificial Sequence: Synthetic peptide
AAMCCHLGV

SEQ ID NO: 45583 - protein, 9 aa, Artificial Sequence
  Description of Artificial Sequence: Synthetic peptide
AAQCCTFGT

SEQ ID NO: 45584 - protein, 9 aa, Artificial Sequence
  Description of Artificial Sequence: Synthetic peptide
AATASGYAS

SEQ ID NO: 45585 - protein, 9 aa, Artificial Sequence
  Description of Artificial Sequence: Synthetic peptide
AAVFNDVEK

SEQ ID NO: 45586 - protein, 9 aa, Artificial Sequence
  Description of Artificial Sequence: Synthetic peptide
AAVGINTRE

SEQ ID NO: 45587 - protein, 9 aa, Artificial Sequence
  Description of Artificial Sequence: Synthetic peptide
AAVGSNEFA

SEQ ID NO: 45588 - protein, 9 aa, Artificial Sequence
  Description of Artificial Sequence: Synthetic peptide
AAWMGNAVM

SEQ ID NO: 45589 - protein, 9 aa, Artificial Sequence
  Description of Artificial Sequence: Synthetic peptide
ACAYSVASE

SEQ ID NO: 45590 - protein, 9 aa, Artificial Sequence
  Description of Artificial Sequence: Synthetic peptide
ACCKAGFLV

SEQ ID NO: 45591 - protein, 9 aa, Artificial Sequence
  Description of Artificial Sequence: Synthetic peptide
ACEYKVVNQ

SEQ ID NO: 45592 - protein, 9 aa, Artificial Sequence
  Description of Artificial Sequence: Synthetic peptide
ACHNNVYHG

SEQ ID NO: 45593 - protein, 9 aa, Artificial Sequence
  Description of Artificial Sequence: Synthetic peptide
ACKANTAQM

SEQ ID NO: 45594 - protein, 9 aa, Artificial Sequence
  Description of Artificial Sequence: Synthetic peptide
ACKFTEISM

SEQ ID NO: 45595 - protein, 9 aa, Artificial Sequence
  Description of Artificial Sequence: Synthetic peptide
ACLTKNWTR

SEQ ID NO: 45596 - protein, 9 aa, Artificial Sequence
  Description of Artificial Sequence: Synthetic peptide
ADNVMHWWT

SEQ ID NO: 45597 - protein, 9 aa, Artificial Sequence
  Description of Artificial Sequence: Synthetic peptide
ADSQSRVMP

SEQ ID NO: 45598 - protein, 9 aa, Artificial Sequence
  Description of Artificial Sequence: Synthetic peptide
ADYHEGMFP

SEQ ID NO: 45599 - protein, 9 aa, Artificial Sequence
  Description of Artificial Sequence: Synthetic peptide
AEHQHLACV

SEQ ID NO: 45600 - protein, 9 aa, Artificial Sequence
  Description of Artificial Sequence: Synthetic peptide
AEMRTMGSQ

SEQ ID NO: 45601 - protein, 9 aa, Artificial Sequence
  Description of Artificial Sequence: Synthetic peptide
AFAGTLQHP

SEQ ID NO: 45602 - protein, 9 aa, Artificial Sequence
  Description of Artificial Sequence: Synthetic peptide
AFAWAHCPV

SEQ ID NO: 45603 - protein, 9 aa, Artificial Sequence
  Description of Artificial Sequence: Synthetic peptide
AFMPQSWTQ

SEQ ID NO: 45604 - protein, 9 aa, Artificial Sequence
  Description of Artificial Sequence: Synthetic peptide
AFMRNFDYP

SEQ ID NO: 45605 - protein, 9 aa, Artificial Sequence
  Description of Artificial Sequence: Synthetic peptide
AFMSTGMLA

SEQ ID NO: 45606 - protein, 9 aa, Artificial Sequence
  Description of Artificial Sequence: Synthetic peptide
AFMVTASNL

SEQ ID NO: 45607 - protein, 9 aa, Artificial Sequence
  Description of Artificial Sequence: Synthetic peptide
AFNHWHYRN

SEQ ID NO: 45608 - protein, 9 aa, Artificial Sequence
  Description of Artificial Sequence: Synthetic peptide
AFRSVVIKW

SEQ ID NO: 45609 - protein, 9 aa, Artificial Sequence
  Description of Artificial Sequence: Synthetic peptide
AGCNRCWKQ

SEQ ID NO: 45610 - protein, 9 aa, Artificial Sequence
  Description of Artificial Sequence: Synthetic peptide
AGDKWMASF

SEQ ID NO: 45611 - protein, 9 aa, Artificial Sequence
  Description of Artificial Sequence: Synthetic peptide
AGGFWCEPF

SEQ ID NO: 45612 - protein, 9 aa, Artificial Sequence
  Description of Artificial Sequence: Synthetic peptide
AGKWWWQYH

SEQ ID NO: 45613 - protein, 9 aa, Artificial Sequence
  Description of Artificial Sequence: Synthetic peptide
AGVTLPVTL

SEQ ID NO: 45614 - protein, 9 aa, Artificial Sequence
  Description of Artificial Sequence: Synthetic peptide
AHIAVFDCD

SEQ ID NO: 45615 - protein, 9 aa, Artificial Sequence
  Description of Artificial Sequence: Synthetic peptide
AHLDMWWSN

SEQ ID NO: 45616 - protein, 9 aa, Artificial Sequence
  Description of Artificial Sequence: Synthetic peptide
AHMCTQQSG

SEQ ID NO: 45617 - protein, 9 aa, Artificial Sequence
  Description of Artificial Sequence: Synthetic peptide
AHMTEIAFA

SEQ ID NO: 45618 - protein, 9 aa, Artificial Sequence
  Description of Artificial Sequence: Synthetic peptide
AHNMDVWCI

SEQ ID NO: 45619 - protein, 9 aa, Artificial Sequence
  Description of Artificial Sequence: Synthetic peptide
AHPPTQYNH

SEQ ID NO: 45620 - protein, 9 aa, Artificial Sequence
  Description of Artificial Sequence: Synthetic peptide
AHTLRQFWE

SEQ ID NO: 45621 - protein, 9 aa, Artificial Sequence
  Description of Artificial Sequence: Synthetic peptide
AIACAHMGG

SEQ ID NO: 45622 - protein, 9 aa, Artificial Sequence
  Description of Artificial Sequence: Synthetic peptide
AIEFHEAFT

SEQ ID NO: 45623 - protein, 9 aa, Artificial Sequence
  Description of Artificial Sequence: Synthetic peptide
AILFLKGND

SEQ ID NO: 45624 - protein, 9 aa, Artificial Sequence
  Description of Artificial Sequence: Synthetic peptide
AINGTGTFT

SEQ ID NO: 45625 - protein, 9 aa, Artificial Sequence
  Description of Artificial Sequence: Synthetic peptide
AINWPMHIE

SEQ ID NO: 45626 - protein, 9 aa, Artificial Sequence
  Description of Artificial Sequence: Synthetic peptide
AIQHPNQWC

SEQ ID NO: 45627 - protein, 9 aa, Artificial Sequence
  Description of Artificial Sequence: Synthetic peptide
AIQNEENPG

SEQ ID NO: 45628 - protein, 9 aa, Artificial Sequence
  Description of Artificial Sequence: Synthetic peptide
AIQTTETEE

SEQ ID NO: 45629 - protein, 9 aa, Artificial Sequence
  Description of Artificial Sequence: Synthetic peptide
AISDKQPWR

SEQ ID NO: 45630 - protein, 9 aa, Artificial Sequence
  Description of Artificial Sequence: Synthetic peptide
AITPCLEFK

SEQ ID NO: 45631 - protein, 9 aa, Artificial Sequence
  Description of Artificial Sequence: Synthetic peptide
AIVEGVKHY

SEQ ID NO: 45632 - protein, 9 aa, Artificial Sequence
  Description of Artificial Sequence: Synthetic peptide
AIVPIWTTN

SEQ ID NO: 45633 - protein, 9 aa, Artificial Sequence
  Description of Artificial Sequence: Synthetic peptide
AIVQFDVEE

SEQ ID NO: 45634 - protein, 9 aa, Artificial Sequence
  Description of Artificial Sequence: Synthetic peptide
AIVTASCPP

SEQ ID NO: 45635 - protein, 9 aa, Artificial Sequence
  Description of Artificial Sequence: Synthetic peptide
AKCCSQLDY

SEQ ID NO: 45636 - protein, 9 aa, Artificial Sequence
  Description of Artificial Sequence: Synthetic peptide
AKCYKEWWP

SEQ ID NO: 45637 - protein, 9 aa, Artificial Sequence
  Description of Artificial Sequence: Synthetic peptide
AKDQYGLLS

SEQ ID NO: 45638 - protein, 9 aa, Artificial Sequence
  Description of Artificial Sequence: Synthetic peptide
AKGLTHLTC

SEQ ID NO: 45639 - protein, 9 aa, Artificial Sequence
  Description of Artificial Sequence: Synthetic peptide
AKLWRYRWI

SEQ ID NO: 45640 - protein, 9 aa, Artificial Sequence
  Description of Artificial Sequence: Synthetic peptide
AKMLKDRAA

SEQ ID NO: 45641 - protein, 9 aa, Artificial Sequence
  Description of Artificial Sequence: Synthetic peptide
AKMPYMSTH

SEQ ID NO: 45642 - protein, 9 aa, Artificial Sequence
  Description of Artificial Sequence: Synthetic peptide
AKQMTAAQM

SEQ ID NO: 45643 - protein, 9 aa, Artificial Sequence
  Description of Artificial Sequence: Synthetic peptide
AKSCEESRP

SEQ ID NO: 45644 - protein, 9 aa, Artificial Sequence
  Description of Artificial Sequence: Synthetic peptide
AKSEFSVSI

SEQ ID NO: 45645 - protein, 9 aa, Artificial Sequence
  Description of Artificial Sequence: Synthetic peptide
AKSGWTLME

SEQ ID NO: 45646 - protein, 9 aa, Artificial Sequence
  Description of Artificial Sequence: Synthetic peptide
ALAHNFNGM

SEQ ID NO: 45647 - protein, 9 aa, Artificial Sequence
  Description of Artificial Sequence: Synthetic peptide
ALDTFCRWP

SEQ ID NO: 45648 - protein, 9 aa, Artificial Sequence
  Description of Artificial Sequence: Synthetic peptide
ALGLNSNHG

SEQ ID NO: 45649 - protein, 9 aa, Artificial Sequence
  Description of Artificial Sequence: Synthetic peptide
ALMTWVRDC

SEQ ID NO: 45650 - protein, 9 aa, Artificial Sequence
  Description of Artificial Sequence: Synthetic peptide
ALWYSKKEC

SEQ ID NO: 45651 - protein, 9 aa, Artificial Sequence
  Description of Artificial Sequence: Synthetic peptide
AMASVRGGD

SEQ ID NO: 45652 - protein, 9 aa, Artificial Sequence
  Description of Artificial Sequence: Synthetic peptide
AMENWYSYQ

SEQ ID NO: 45653 - protein, 9 aa, Artificial Sequence
  Description of Artificial Sequence: Synthetic peptide
AMLDGMTSG

SEQ ID NO: 45654 - protein, 9 aa, Artificial Sequence
  Description of Artificial Sequence: Synthetic peptide
AMLMSKEVA

SEQ ID NO: 45655 - protein, 9 aa, Artificial Sequence
  Description of Artificial Sequence: Synthetic peptide
AMMQGVSNQ

SEQ ID NO: 45656 - protein, 9 aa, Artificial Sequence
  Description of Artificial Sequence: Synthetic peptide
AMNVIASHF

SEQ ID NO: 45657 - protein, 9 aa, Artificial Sequence
  Description of Artificial Sequence: Synthetic peptide
AMSCYTLWC

SEQ ID NO: 45658 - protein, 9 aa, Artificial Sequence
  Description of Artificial Sequence: Synthetic peptide
AMSFTQFCS

SEQ ID NO: 45659 - protein, 9 aa, Artificial Sequence
  Description of Artificial Sequence: Synthetic peptide
AMSPIVDAP

SEQ ID NO: 45660 - protein, 9 aa, Artificial Sequence
  Description of Artificial Sequence: Synthetic peptide
AMSRLMMFS

SEQ ID NO: 45661 - protein, 9 aa, Artificial Sequence
  Description of Artificial Sequence: Synthetic peptide
AMVEPQCQG

SEQ ID NO: 45662 - protein, 9 aa, Artificial Sequence
  Description of Artificial Sequence: Synthetic peptide
AMWFCSVGD

SEQ ID NO: 45663 - protein, 9 aa, Artificial Sequence
  Description of Artificial Sequence: Synthetic peptide
AMWRLNNVF

SEQ ID NO: 45664 - protein, 9 aa, Artificial Sequence
  Description of Artificial Sequence: Synthetic peptide
ANCTQENQT

SEQ ID NO: 45665 - protein, 9 aa, Artificial Sequence
  Description of Artificial Sequence: Synthetic peptide
ANECKQNVE

SEQ ID NO: 45666 - protein, 9 aa, Artificial Sequence
  Description of Artificial Sequence: Synthetic peptide
ANHVTDTSC

SEQ ID NO: 45667 - protein, 9 aa, Artificial Sequence
  Description of Artificial Sequence: Synthetic peptide
ANKMIVLNH

SEQ ID NO: 45668 - protein, 9 aa, Artificial Sequence
  Description of Artificial Sequence: Synthetic peptide
ANKSVGEWR

SEQ ID NO: 45669 - protein, 9 aa, Artificial Sequence
  Description of Artificial Sequence: Synthetic peptide
ANLFYSDRD

SEQ ID NO: 45670 - protein, 9 aa, Artificial Sequence
  Description of Artificial Sequence: Synthetic peptide
ANLLGHYQA

SEQ ID NO: 45671 - protein, 9 aa, Artificial Sequence
  Description of Artificial Sequence: Synthetic peptide
ANMLTNCDT

SEQ ID NO: 45672 - protein, 9 aa, Artificial Sequence
  Description of Artificial Sequence: Synthetic peptide
ANMNCDKFS

SEQ ID NO: 45673 - protein, 9 aa, Artificial Sequence
  Description of Artificial Sequence: Synthetic peptide
ANNVHCVKK

SEQ ID NO: 45674 - protein, 9 aa, Artificial Sequence
  Description of Artificial Sequence: Synthetic peptide
ANNVTQAER

SEQ ID NO: 45675 - protein, 9 aa, Artificial Sequence
  Description of Artificial Sequence: Synthetic peptide
ANQCHMGYT

SEQ ID NO: 45676 - protein, 9 aa, Artificial Sequence
  Description of Artificial Sequence: Synthetic peptide
ANTRFPMKD

SEQ ID NO: 45677 - protein, 9 aa, Artificial Sequence
  Description of Artificial Sequence: Synthetic peptide
APDTWVPVY

SEQ ID NO: 45678 - protein, 9 aa, Artificial Sequence
  Description of Artificial Sequence: Synthetic peptide
APGNHNNWW

SEQ ID NO: 45679 - protein, 9 aa, Artificial Sequence
  Description of Artificial Sequence: Synthetic peptide
APHCEKENG

SEQ ID NO: 45680 - protein, 9 aa, Artificial Sequence
  Description of Artificial Sequence: Synthetic peptide
APISWQMAL

SEQ ID NO: 45681 - protein, 9 aa, Artificial Sequence
  Description of Artificial Sequence: Synthetic peptide
APSMRKIIP

SEQ ID NO: 45682 - protein, 9 aa, Artificial Sequence
  Description of Artificial Sequence: Synthetic peptide
APSNPRKVA

SEQ ID NO: 45683 - protein, 9 aa, Artificial Sequence
  Description of Artificial Sequence: Synthetic peptide
AQAEKPCSY

SEQ ID NO: 45684 - protein, 9 aa, Artificial Sequence
  Description of Artificial Sequence: Synthetic peptide
AQAKEWKTK

SEQ ID NO: 45685 - protein, 9 aa, Artificial Sequence
  Description of Artificial Sequence: Synthetic peptide
AQCYKFNGH

SEQ ID NO: 45686 - protein, 9 aa, Artificial Sequence
  Description of Artificial Sequence: Synthetic peptide
AQHTVWRFA

SEQ ID NO: 45687 - protein, 9 aa, Artificial Sequence
  Description of Artificial Sequence: Synthetic peptide
AQLPFCQQD

SEQ ID NO: 45688 - protein, 9 aa, Artificial Sequence
  Description of Artificial Sequence: Synthetic peptide
AQQKGGITF

SEQ ID NO: 45689 - protein, 9 aa, Artificial Sequence
  Description of Artificial Sequence: Synthetic peptide
AQSAISVMV

SEQ ID NO: 45690 - protein, 9 aa, Artificial Sequence
  Description of Artificial Sequence: Synthetic peptide
AQSAWHSWP

SEQ ID NO: 45691 - protein, 9 aa, Artificial Sequence
  Description of Artificial Sequence: Synthetic peptide
ARLACCSAD

SEQ ID NO: 45692 - protein, 9 aa, Artificial Sequence
  Description of Artificial Sequence: Synthetic peptide
ARMYYDDQP

SEQ ID NO: 45693 - protein, 9 aa, Artificial Sequence
  Description of Artificial Sequence: Synthetic peptide
ARRLWQNDQ

SEQ ID NO: 45694 - protein, 9 aa, Artificial Sequence
  Description of Artificial Sequence: Synthetic peptide
ARVQENHVG

SEQ ID NO: 45695 - protein, 9 aa, Artificial Sequence
  Description of Artificial Sequence: Synthetic peptide
ASGMQGSWH

SEQ ID NO: 45696 - protein, 9 aa, Artificial Sequence
  Description of Artificial Sequence: Synthetic peptide
ASIMQTKGI

SEQ ID NO: 45697 - protein, 9 aa, Artificial Sequence
  Description of Artificial Sequence: Synthetic peptide
ASKPGIIFD

SEQ ID NO: 45698 - protein, 9 aa, Artificial Sequence
  Description of Artificial Sequence: Synthetic peptide
ASMPFLSYT

SEQ ID NO: 45699 - protein, 9 aa, Artificial Sequence
  Description of Artificial Sequence: Synthetic peptide
ASNILDLPE

SEQ ID NO: 45700 - protein, 9 aa, Artificial Sequence
  Description of Artificial Sequence: Synthetic peptide
ASQWKIHGA

SEQ ID NO: 45701 - protein, 9 aa, Artificial Sequence
  Description of Artificial Sequence: Synthetic peptide
ASSPFSQVR

SEQ ID NO: 45702 - protein, 9 aa, Artificial Sequence
  Description of Artificial Sequence: Synthetic peptide
ASTCKKLAM

SEQ ID NO: 45703 - protein, 9 aa, Artificial Sequence
  Description of Artificial Sequence: Synthetic peptide
ASYSILKQR

SEQ ID NO: 45704 - protein, 9 aa, Artificial Sequence
  Description of Artificial Sequence: Synthetic peptide
ATAHIAPPS

SEQ ID NO: 45705 - protein, 9 aa, Artificial Sequence
  Description of Artificial Sequence: Synthetic peptide
ATDTMQFIW

SEQ ID NO: 45706 - protein, 9 aa, Artificial Sequence
  Description of Artificial Sequence: Synthetic peptide
ATIAQWCVH

SEQ ID NO: 45707 - protein, 9 aa, Artificial Sequence
  Description of Artificial Sequence: Synthetic peptide
ATKLGCSRI

SEQ ID NO: 45708 - protein, 9 aa, Artificial Sequence
  Description of Artificial Sequence: Synthetic peptide
ATLGHVMMC

SEQ ID NO: 45709 - protein, 9 aa, Artificial Sequence
  Description of Artificial Sequence: Synthetic peptide
ATLTNQHAE

SEQ ID NO: 45710 - protein, 9 aa, Artificial Sequence
  Description of Artificial Sequence: Synthetic peptide
ATMMKWDAN

SEQ ID NO: 45711 - protein, 9 aa, Artificial Sequence
  Description of Artificial Sequence: Synthetic peptide
ATMWLEDQC

SEQ ID NO: 45712 - protein, 9 aa, Artificial Sequence
  Description of Artificial Sequence: Synthetic peptide
ATRAMQVLE

SEQ ID NO: 45713 - protein, 9 aa, Artificial Sequence
  Description of Artificial Sequence: Synthetic peptide
ATRLAFHQG

SEQ ID NO: 45714 - protein, 9 aa, Artificial Sequence
  Description of Artificial Sequence: Synthetic peptide
ATRLITYAV

SEQ ID NO: 45715 - protein, 9 aa, Artificial Sequence
  Description of Artificial Sequence: Synthetic peptide
ATSFTQFCS

SEQ ID NO: 45716 - protein, 9 aa, Artificial Sequence
  Description of Artificial Sequence: Synthetic peptide
ATSGQTYSV

SEQ ID NO: 45717 - protein, 9 aa, Artificial Sequence
  Description of Artificial Sequence: Synthetic peptide
ATSMCMHPR

SEQ ID NO: 45718 - protein, 9 aa, Artificial Sequence
  Description of Artificial Sequence: Synthetic peptide
ATSPHLAWG

SEQ ID NO: 45719 - protein, 9 aa, Artificial Sequence
  Description of Artificial Sequence: Synthetic peptide
ATVKFSDCV

SEQ ID NO: 45720 - protein, 9 aa, Artificial Sequence
  Description of Artificial Sequence: Synthetic peptide
ATYKIDTSC

SEQ ID NO: 45721 - protein, 9 aa, Artificial Sequence
  Description of Artificial Sequence: Synthetic peptide
AVAIRSWCG

SEQ ID NO: 45722 - protein, 9 aa, Artificial Sequence
  Description of Artificial Sequence: Synthetic peptide
AVAMEFNVV

SEQ ID NO: 45723 - protein, 9 aa, Artificial Sequence
  Description of Artificial Sequence: Synthetic peptide
AVDPMCFDE

SEQ ID NO: 45724 - protein, 9 aa, Artificial Sequence
  Description of Artificial Sequence: Synthetic peptide
AVESICSTE

SEQ ID NO: 45725 - protein, 9 aa, Artificial Sequence
  Description of Artificial Sequence: Synthetic peptide
AVFIPGQFW

SEQ ID NO: 45726 - protein, 9 aa, Artificial Sequence
  Description of Artificial Sequence: Synthetic peptide
AVGMCQMDL

SEQ ID NO: 45727 - protein, 9 aa, Artificial Sequence
  Description of Artificial Sequence: Synthetic peptide
AVLIAGAGH

SEQ ID NO: 45728 - protein, 9 aa, Artificial Sequence
  Description of Artificial Sequence: Synthetic peptide
AVLKAEVVK

SEQ ID NO: 45729 - protein, 9 aa, Artificial Sequence
  Description of Artificial Sequence: Synthetic peptide
AVPFPWGCC

SEQ ID NO: 45730 - protein, 9 aa, Artificial Sequence
  Description of Artificial Sequence: Synthetic peptide
AVQLWWWHN

SEQ ID NO: 45731 - protein, 9 aa, Artificial Sequence
  Description of Artificial Sequence: Synthetic peptide
AVRFYSTPI

SEQ ID NO: 45732 - protein, 9 aa, Artificial Sequence
  Description of Artificial Sequence: Synthetic peptide
AVRWSQTPG

SEQ ID NO: 45733 - protein, 9 aa, Artificial Sequence
  Description of Artificial Sequence: Synthetic peptide
AVTVVGTQI

SEQ ID NO: 45734 - protein, 9 aa, Artificial Sequence
  Description of Artificial Sequence: Synthetic peptide
AVVAQCQSW

SEQ ID NO: 45735 - protein, 9 aa, Artificial Sequence
  Description of Artificial Sequence: Synthetic peptide
AVVGWTAGQ

SEQ ID NO: 45736 - protein, 9 aa, Artificial Sequence
  Description of Artificial Sequence: Synthetic peptide
AVYIMTQLQ

SEQ ID NO: 45737 - protein, 9 aa, Artificial Sequence
  Description of Artificial Sequence: Synthetic peptide
AWAEPDMRW

SEQ ID NO: 45738 - protein, 9 aa, Artificial Sequence
  Description of Artificial Sequence: Synthetic peptide
AWDAESCYK

SEQ ID NO: 45739 - protein, 9 aa, Artificial Sequence
  Description of Artificial Sequence: Synthetic peptide
AWEKIHRSP

SEQ ID NO: 45740 - protein, 9 aa, Artificial Sequence
  Description of Artificial Sequence: Synthetic peptide
AWITCLIAP

SEQ ID NO: 45741 - protein, 9 aa, Artificial Sequence
  Description of Artificial Sequence: Synthetic peptide
AWMHDTCTK

SEQ ID NO: 45742 - protein, 9 aa, Artificial Sequence
  Description of Artificial Sequence: Synthetic peptide
AWRSVASNH

SEQ ID NO: 45743 - protein, 9 aa, Artificial Sequence
  Description of Artificial Sequence: Synthetic peptide
AWTHHFTLD

SEQ ID NO: 45744 - protein, 9 aa, Artificial Sequence
  Description of Artificial Sequence: Synthetic peptide
AWWRVTHEQ

SEQ ID NO: 45745 - protein, 9 aa, Artificial Sequence
  Description of Artificial Sequence: Synthetic peptide
AYAPLSHNN

SEQ ID NO: 45746 - protein, 9 aa, Artificial Sequence
  Description of Artificial Sequence: Synthetic peptide
AYCEIPTNP

SEQ ID NO: 45747 - protein, 9 aa, Artificial Sequence
  Description of Artificial Sequence: Synthetic peptide
AYDHVLESR

SEQ ID NO: 45748 - protein, 9 aa, Artificial Sequence
  Description of Artificial Sequence: Synthetic peptide
AYEYRNHEF

SEQ ID NO: 45749 - protein, 9 aa, Artificial Sequence
  Description of Artificial Sequence: Synthetic peptide
AYFPNSWGQ

SEQ ID NO: 45750 - protein, 9 aa, Artificial Sequence
  Description of Artificial Sequence: Synthetic peptide
AYNRVWSCG

SEQ ID NO: 45751 - protein, 9 aa, Artificial Sequence
  Description of Artificial Sequence: Synthetic peptide
AYPQCFQNP

SEQ ID NO: 45752 - protein, 9 aa, Artificial Sequence
  Description of Artificial Sequence: Synthetic peptide
AYQAKYDLA

SEQ ID NO: 45753 - protein, 9 aa, Artificial Sequence
  Description of Artificial Sequence: Synthetic peptide
AYTETSYLH

SEQ ID NO: 45754 - protein, 9 aa, Artificial Sequence
  Description of Artificial Sequence: Synthetic peptide
AYTLCLCNE

SEQ ID NO: 45755 - protein, 9 aa, Artificial Sequence
  Description of Artificial Sequence: Synthetic peptide
CANCPMFPT

SEQ ID NO: 45756 - protein, 9 aa, Artificial Sequence
  Description of Artificial Sequence: Synthetic peptide
CAQFKMTYF

SEQ ID NO: 45757 - protein, 9 aa, Artificial Sequence
  Description of Artificial Sequence: Synthetic peptide
CARQPMPPA

SEQ ID NO: 45758 - protein, 9 aa, Artificial Sequence
  Description of Artificial Sequence: Synthetic peptide
CAYAIMPCE

SEQ ID NO: 45759 - protein, 9 aa, Artificial Sequence
  Description of Artificial Sequence: Synthetic peptide
CCFQFELEC

SEQ ID NO: 45760 - protein, 9 aa, Artificial Sequence
  Description of Artificial Sequence: Synthetic peptide
CCIFIWWLY

SEQ ID NO: 45761 - protein, 9 aa, Artificial Sequence
  Description of Artificial Sequence: Synthetic peptide
CCSNKSRFV

SEQ ID NO: 45762 - protein, 9 aa, Artificial Sequence
  Description of Artificial Sequence: Synthetic peptide
CCSPLCQQP

SEQ ID NO: 45763 - protein, 9 aa, Artificial Sequence
  Description of Artificial Sequence: Synthetic peptide
CCVPMMNVC

SEQ ID NO: 45764 - protein, 9 aa, Artificial Sequence
  Description of Artificial Sequence: Synthetic peptide
CCVTAWKNQ

SEQ ID NO: 45765 - protein, 9 aa, Artificial Sequence
  Description of Artificial Sequence: Synthetic peptide
CDAIYVSCG

SEQ ID NO: 45766 - protein, 9 aa, Artificial Sequence
  Description of Artificial Sequence: Synthetic peptide
CDCLFMLHQ

SEQ ID NO: 45767 - protein, 9 aa, Artificial Sequence
  Description of Artificial Sequence: Synthetic peptide
CDNGYETNE

SEQ ID NO: 45768 - protein, 9 aa, Artificial Sequence
  Description of Artificial Sequence: Synthetic peptide
CFCQGFRKR

SEQ ID NO: 45769 - protein, 9 aa, Artificial Sequence
  Description of Artificial Sequence: Synthetic peptide
CFEHWADFE

SEQ ID NO: 45770 - protein, 9 aa, Artificial Sequence
  Description of Artificial Sequence: Synthetic peptide
CFEKKQTDG

SEQ ID NO: 45771 - protein, 9 aa, Artificial Sequence
  Description of Artificial Sequence: Synthetic peptide
CGEQKDQIG

SEQ ID NO: 45772 - protein, 9 aa, Artificial Sequence
  Description of Artificial Sequence: Synthetic peptide
CGHLYNRDF

SEQ ID NO: 45773 - protein, 9 aa, Artificial Sequence
  Description of Artificial Sequence: Synthetic peptide
CGLDYAMCQ

SEQ ID NO: 45774 - protein, 9 aa, Artificial Sequence
  Description of Artificial Sequence: Synthetic peptide
CGRHWKEWE

SEQ ID NO: 45775 - protein, 9 aa, Artificial Sequence
  Description of Artificial Sequence: Synthetic peptide
CGRQCKACF

SEQ ID NO: 45776 - protein, 9 aa, Artificial Sequence
  Description of Artificial Sequence: Synthetic peptide
CHCQWMCQN

SEQ ID NO: 45777 - protein, 9 aa, Artificial Sequence
  Description of Artificial Sequence: Synthetic peptide
CHGAHQKLE

SEQ ID NO: 45778 - protein, 9 aa, Artificial Sequence
  Description of Artificial Sequence: Synthetic peptide
CHMPWHIHE

SEQ ID NO: 45779 - protein, 9 aa, Artificial Sequence
  Description of Artificial Sequence: Synthetic peptide
CHMSTVMKV

SEQ ID NO: 45780 - protein, 9 aa, Artificial Sequence
  Description of Artificial Sequence: Synthetic peptide
CHQETFLDA

SEQ ID NO: 45781 - protein, 9 aa, Artificial Sequence
  Description of Artificial Sequence: Synthetic peptide
CHTGLMDAM

SEQ ID NO: 45782 - protein, 9 aa, Artificial Sequence
  Description of Artificial Sequence: Synthetic peptide
CHVQFDGFG

SEQ ID NO: 45783 - protein, 9 aa, Artificial Sequence
  Description of Artificial Sequence: Synthetic peptide
CICREGKFY

SEQ ID NO: 45784 - protein, 9 aa, Artificial Sequence
  Description of Artificial Sequence: Synthetic peptide
CIMACQDRT

SEQ ID NO: 45785 - protein, 9 aa, Artificial Sequence
  Description of Artificial Sequence: Synthetic peptide
CIMGMQWQF

SEQ ID NO: 45786 - protein, 9 aa, Artificial Sequence
  Description of Artificial Sequence: Synthetic peptide
CIRHQNHYW

SEQ ID NO: 45787 - protein, 9 aa, Artificial Sequence
  Description of Artificial Sequence: Synthetic peptide
CITAEQCGE

SEQ ID NO: 45788 - protein, 9 aa, Artificial Sequence
  Description of Artificial Sequence: Synthetic peptide
CITPQFTSS

SEQ ID NO: 45789 - protein, 9 aa, Artificial Sequence
  Description of Artificial Sequence: Synthetic peptide
CIVKRMECF

SEQ ID NO: 45790 - protein, 9 aa, Artificial Sequence
  Description of Artificial Sequence: Synthetic peptide
CKAMTLAEM

SEQ ID NO: 45791 - protein, 9 aa, Artificial Sequence
  Description of Artificial Sequence: Synthetic peptide
CKCYEMEVS

SEQ ID NO: 45792 - protein, 9 aa, Artificial Sequence
  Description of Artificial Sequence: Synthetic peptide
CKEPHTMHE

SEQ ID NO: 45793 - protein, 9 aa, Artificial Sequence
  Description of Artificial Sequence: Synthetic peptide
CKKPLGTRI

SEQ ID NO: 45794 - protein, 9 aa, Artificial Sequence
  Description of Artificial Sequence: Synthetic peptide
CKNEYRIHT

SEQ ID NO: 45795 - protein, 9 aa, Artificial Sequence
  Description of Artificial Sequence: Synthetic peptide
CKSVNPRMM

SEQ ID NO: 45796 - protein, 9 aa, Artificial Sequence
  Description of Artificial Sequence: Synthetic peptide
CKVEWWHGN

SEQ ID NO: 45797 - protein, 9 aa, Artificial Sequence
  Description of Artificial Sequence: Synthetic peptide
CKYEISSGL

SEQ ID NO: 45798 - protein, 9 aa, Artificial Sequence
  Description of Artificial Sequence: Synthetic peptide
CLVSCPALN

SEQ ID NO: 45799 - protein, 9 aa, Artificial Sequence
  Description of Artificial Sequence: Synthetic peptide
CLYVPLFAD

SEQ ID NO: 45800 - protein, 9 aa, Artificial Sequence
  Description of Artificial Sequence: Synthetic peptide
CMEGGLMDW

SEQ ID NO: 45801 - protein, 9 aa, Artificial Sequence
  Description of Artificial Sequence: Synthetic peptide
CMEMMKWAN

SEQ ID NO: 45802 - protein, 9 aa, Artificial Sequence
  Description of Artificial Sequence: Synthetic peptide
CMFWANCSQ

SEQ ID NO: 45803 - protein, 9 aa, Artificial Sequence
  Description of Artificial Sequence: Synthetic peptide
CMGSGFAEL

SEQ ID NO: 45804 - protein, 9 aa, Artificial Sequence
  Description of Artificial Sequence: Synthetic peptide
CMKMWDCGK

SEQ ID NO: 45805 - protein, 9 aa, Artificial Sequence
  Description of Artificial Sequence: Synthetic peptide
CMMPVLEEC

SEQ ID NO: 45806 - protein, 9 aa, Artificial Sequence
  Description of Artificial Sequence: Synthetic peptide
CMRWFLLGS

SEQ ID NO: 45807 - protein, 9 aa, Artificial Sequence
  Description of Artificial Sequence: Synthetic peptide
CNEVPSVMP

SEQ ID NO: 45808 - protein, 9 aa, Artificial Sequence
  Description of Artificial Sequence: Synthetic peptide
CNSQKSYAH

SEQ ID NO: 45809 - protein, 9 aa, Artificial Sequence
  Description of Artificial Sequence: Synthetic peptide
CNSWNCAYA

SEQ ID NO: 45810 - protein, 9 aa, Artificial Sequence
  Description of Artificial Sequence: Synthetic peptide
CPDVGFQSG

SEQ ID NO: 45811 - protein, 9 aa, Artificial Sequence
  Description of Artificial Sequence: Synthetic peptide
CPHLFVFDW

SEQ ID NO: 45812 - protein, 9 aa, Artificial Sequence
  Description of Artificial Sequence: Synthetic peptide
CPPSNNPCE

SEQ ID NO: 45813 - protein, 9 aa, Artificial Sequence
  Description of Artificial Sequence: Synthetic peptide
CPSRTWAIE

SEQ ID NO: 45814 - protein, 9 aa, Artificial Sequence
  Description of Artificial Sequence: Synthetic peptide
CPTIIVKDW

SEQ ID NO: 45815 - protein, 9 aa, Artificial Sequence
  Description of Artificial Sequence: Synthetic peptide
CPVANTTHP

SEQ ID NO: 45816 - protein, 9 aa, Artificial Sequence
  Description of Artificial Sequence: Synthetic peptide
CQEFNSHTD

SEQ ID NO: 45817 - protein, 9 aa, Artificial Sequence
  Description of Artificial Sequence: Synthetic peptide
CQNFSSLPW

SEQ ID NO: 45818 - protein, 9 aa, Artificial Sequence
  Description of Artificial Sequence: Synthetic peptide
CQSVSANHI

SEQ ID NO: 45819 - protein, 9 aa, Artificial Sequence
  Description of Artificial Sequence: Synthetic peptide
CRARRNPRL

SEQ ID NO: 45820 - protein, 9 aa, Artificial Sequence
  Description of Artificial Sequence: Synthetic peptide
CRIRKRHIT

SEQ ID NO: 45821 - protein, 9 aa, Artificial Sequence
  Description of Artificial Sequence: Synthetic peptide
CSCDEMEID

SEQ ID NO: 45822 - protein, 9 aa, Artificial Sequence
  Description of Artificial Sequence: Synthetic peptide
CSDACQAMV

SEQ ID NO: 45823 - protein, 9 aa, Artificial Sequence
  Description of Artificial Sequence: Synthetic peptide
CSDMLTKCN

SEQ ID NO: 45824 - protein, 9 aa, Artificial Sequence
  Description of Artificial Sequence: Synthetic peptide
CSEHENLGI

SEQ ID NO: 45825 - protein, 9 aa, Artificial Sequence
  Description of Artificial Sequence: Synthetic peptide
CSEKFNLHC

SEQ ID NO: 45826 - protein, 9 aa, Artificial Sequence
  Description of Artificial Sequence: Synthetic peptide
CSETQVSTG

SEQ ID NO: 45827 - protein, 9 aa, Artificial Sequence
  Description of Artificial Sequence: Synthetic peptide
CSQPHQMAS

SEQ ID NO: 45828 - protein, 9 aa, Artificial Sequence
  Description of Artificial Sequence: Synthetic peptide
CSQRCMSFG

SEQ ID NO: 45829 - protein, 9 aa, Artificial Sequence
  Description of Artificial Sequence: Synthetic peptide
CSRSDLLCG

SEQ ID NO: 45830 - protein, 9 aa, Artificial Sequence
  Description of Artificial Sequence: Synthetic peptide
CSVWCIYYR

SEQ ID NO: 45831 - protein, 9 aa, Artificial Sequence
  Description of Artificial Sequence: Synthetic peptide
CSYPAHRFH

SEQ ID NO: 45832 - protein, 9 aa, Artificial Sequence
  Description of Artificial Sequence: Synthetic peptide
CTEVMAMGT

SEQ ID NO: 45833 - protein, 9 aa, Artificial Sequence
  Description of Artificial Sequence: Synthetic peptide
CTFSSDKSD

SEQ ID NO: 45834 - protein, 9 aa, Artificial Sequence
  Description of Artificial Sequence: Synthetic peptide
CTKLVNWYT

SEQ ID NO: 45835 - protein, 9 aa, Artificial Sequence
  Description of Artificial Sequence: Synthetic peptide
CTLRCIMHT

SEQ ID NO: 45836 - protein, 9 aa, Artificial Sequence
  Description of Artificial Sequence: Synthetic peptide
CTMRSGVGT

SEQ ID NO: 45837 - protein, 9 aa, Artificial Sequence
  Description of Artificial Sequence: Synthetic peptide
CTPTILRGV

SEQ ID NO: 45838 - protein, 9 aa, Artificial Sequence
  Description of Artificial Sequence: Synthetic peptide
CTQSQCHLC

SEQ ID NO: 45839 - protein, 9 aa, Artificial Sequence
  Description of Artificial Sequence: Synthetic peptide
CTTEVRGTP

SEQ ID NO: 45840 - protein, 9 aa, Artificial Sequence
  Description of Artificial Sequence: Synthetic peptide
CTTMKMNQA

SEQ ID NO: 45841 - protein, 9 aa, Artificial Sequence
  Description of Artificial Sequence: Synthetic peptide
CTWFIQGPK

SEQ ID NO: 45842 - protein, 9 aa, Artificial Sequence
  Description of Artificial Sequence: Synthetic peptide
CTYLAKLKC

SEQ ID NO: 45843 - protein, 9 aa, Artificial Sequence
  Description of Artificial Sequence: Synthetic peptide
CVAAWGENG

SEQ ID NO: 45844 - protein, 9 aa, Artificial Sequence
  Description of Artificial Sequence: Synthetic peptide
CVDNPFVLV

SEQ ID NO: 45845 - protein, 9 aa, Artificial Sequence
  Description of Artificial Sequence: Synthetic peptide
CVFMGMMWD

SEQ ID NO: 45846 - protein, 9 aa, Artificial Sequence
  Description of Artificial Sequence: Synthetic peptide
CVGRWWNFY

SEQ ID NO: 45847 - protein, 9 aa, Artificial Sequence
  Description of Artificial Sequence: Synthetic peptide
CVHISDFGD

SEQ ID NO: 45848 - protein, 9 aa, Artificial Sequence
  Description of Artificial Sequence: Synthetic peptide
CVIQGHSIE

SEQ ID NO: 45849 - protein, 9 aa, Artificial Sequence
  Description of Artificial Sequence: Synthetic peptide
CVMAIESRG

SEQ ID NO: 45850 - protein, 9 aa, Artificial Sequence
  Description of Artificial Sequence: Synthetic peptide
CVNRQHRIN

SEQ ID NO: 45851 - protein, 9 aa, Artificial Sequence
  Description of Artificial Sequence: Synthetic peptide
CVPASGGWD

SEQ ID NO: 45852 - protein, 9 aa, Artificial Sequence
  Description of Artificial Sequence: Synthetic peptide
CVTMKEFAM

SEQ ID NO: 45853 - protein, 9 aa, Artificial Sequence
  Description of Artificial Sequence: Synthetic peptide
CWRQYVAGQ

SEQ ID NO: 45854 - protein, 9 aa, Artificial Sequence
  Description of Artificial Sequence: Synthetic peptide
CYCTCEQPD

SEQ ID NO: 45855 - protein, 9 aa, Artificial Sequence
  Description of Artificial Sequence: Synthetic peptide
CYELTMPLD

SEQ ID NO: 45856 - protein, 9 aa, Artificial Sequence
  Description of Artificial Sequence: Synthetic peptide
DADRNNMSV

SEQ ID NO: 45857 - protein, 9 aa, Artificial Sequence
  Description of Artificial Sequence: Synthetic peptide
DAEMLCYDY

SEQ ID NO: 45858 - protein, 9 aa, Artificial Sequence
  Description of Artificial Sequence: Synthetic peptide
DAFWSNLHL

SEQ ID NO: 45859 - protein, 9 aa, Artificial Sequence
  Description of Artificial Sequence: Synthetic peptide
DAHWGALSV

SEQ ID NO: 45860 - protein, 9 aa, Artificial Sequence
  Description of Artificial Sequence: Synthetic peptide
DAIPKKWYG

SEQ ID NO: 45861 - protein, 9 aa, Artificial Sequence
  Description of Artificial Sequence: Synthetic peptide
DALANNESR

SEQ ID NO: 45862 - protein, 9 aa, Artificial Sequence
  Description of Artificial Sequence: Synthetic peptide
DALSMLRAP

SEQ ID NO: 45863 - protein, 9 aa, Artificial Sequence
  Description of Artificial Sequence: Synthetic peptide
DALTNRASH

SEQ ID NO: 45864 - protein, 9 aa, Artificial Sequence
  Description of Artificial Sequence: Synthetic peptide
DASMMWSRG

SEQ ID NO: 45865 - protein, 9 aa, Artificial Sequence
  Description of Artificial Sequence: Synthetic peptide
DASYEYQSL

SEQ ID NO: 45866 - protein, 9 aa, Artificial Sequence
  Description of Artificial Sequence: Synthetic peptide
DCAQTGEYG

SEQ ID NO: 45867 - protein, 9 aa, Artificial Sequence
  Description of Artificial Sequence: Synthetic peptide
DCKNHYQSS

SEQ ID NO: 45868 - protein, 9 aa, Artificial Sequence
  Description of Artificial Sequence: Synthetic peptide
DCMWYNRID

SEQ ID NO: 45869 - protein, 9 aa, Artificial Sequence
  Description of Artificial Sequence: Synthetic peptide
DCPRSKMMT

SEQ ID NO: 45870 - protein, 9 aa, Artificial Sequence
  Description of Artificial Sequence: Synthetic peptide
DCPTYYWRD

SEQ ID NO: 45871 - protein, 9 aa, Artificial Sequence
  Description of Artificial Sequence: Synthetic peptide
DCSCHELAL

SEQ ID NO: 45872 - protein, 9 aa, Artificial Sequence
  Description of Artificial Sequence: Synthetic peptide
DCYHICVTP

SEQ ID NO: 45873 - protein, 9 aa, Artificial Sequence
  Description of Artificial Sequence: Synthetic peptide
DDELCPQCN

SEQ ID NO: 45874 - protein, 9 aa, Artificial Sequence
  Description of Artificial Sequence: Synthetic peptide
DDHQSTWMN

SEQ ID NO: 45875 - protein, 9 aa, Artificial Sequence
  Description of Artificial Sequence: Synthetic peptide
DDRCVQAAK

SEQ ID NO: 45876 - protein, 9 aa, Artificial Sequence
  Description of Artificial Sequence: Synthetic peptide
DFAVSTSFD

SEQ ID NO: 45877 - protein, 9 aa, Artificial Sequence
  Description of Artificial Sequence: Synthetic peptide
DFCMKEKAV

SEQ ID NO: 45878 - protein, 9 aa, Artificial Sequence
  Description of Artificial Sequence: Synthetic peptide
DGCVHNQAI

SEQ ID NO: 45879 - protein, 9 aa, Artificial Sequence
  Description of Artificial Sequence: Synthetic peptide
DGPICKGIY

SEQ ID NO: 45880 - protein, 9 aa, Artificial Sequence
  Description of Artificial Sequence: Synthetic peptide
DGTHPCWNG

SEQ ID NO: 45881 - protein, 9 aa, Artificial Sequence
  Description of Artificial Sequence: Synthetic peptide
DHCKTALPN

SEQ ID NO: 45882 - protein, 9 aa, Artificial Sequence
  Description of Artificial Sequence: Synthetic peptide
DHERQRWLH

SEQ ID NO: 45883 - protein, 9 aa, Artificial Sequence
  Description of Artificial Sequence: Synthetic peptide
DHIRQHTCS

SEQ ID NO: 45884 - protein, 9 aa, Artificial Sequence
  Description of Artificial Sequence: Synthetic peptide
DHLKIRGAY

SEQ ID NO: 45885 - protein, 9 aa, Artificial Sequence
  Description of Artificial Sequence: Synthetic peptide
DHQKRNVIQ

SEQ ID NO: 45886 - protein, 9 aa, Artificial Sequence
  Description of Artificial Sequence: Synthetic peptide
DHQLVLVSG

SEQ ID NO: 45887 - protein, 9 aa, Artificial Sequence
  Description of Artificial Sequence: Synthetic peptide
DHTVLFEGQ

SEQ ID NO: 45888 - protein, 9 aa, Artificial Sequence
  Description of Artificial Sequence: Synthetic peptide
DHWITGPCR

SEQ ID NO: 45889 - protein, 9 aa, Artificial Sequence
  Description of Artificial Sequence: Synthetic peptide
DHYLGHASY

SEQ ID NO: 45890 - protein, 9 aa, Artificial Sequence
  Description of Artificial Sequence: Synthetic peptide
DICWKGWCF

SEQ ID NO: 45891 - protein, 9 aa, Artificial Sequence
  Description of Artificial Sequence: Synthetic peptide
DIDRFTDVQ

SEQ ID NO: 45892 - protein, 9 aa, Artificial Sequence
  Description of Artificial Sequence: Synthetic peptide
DIECKEIAI

SEQ ID NO: 45893 - protein, 9 aa, Artificial Sequence
  Description of Artificial Sequence: Synthetic peptide
DIEITMQEN

SEQ ID NO: 45894 - protein, 9 aa, Artificial Sequence
  Description of Artificial Sequence: Synthetic peptide
DIGPQDHWP

SEQ ID NO: 45895 - protein, 9 aa, Artificial Sequence
  Description of Artificial Sequence: Synthetic peptide
DIHWMDHDF

SEQ ID NO: 45896 - protein, 9 aa, Artificial Sequence
  Description of Artificial Sequence: Synthetic peptide
DIIEKVNEM

SEQ ID NO: 45897 - protein, 9 aa, Artificial Sequence
  Description of Artificial Sequence: Synthetic peptide
DILERMNRA

SEQ ID NO: 45898 - protein, 9 aa, Artificial Sequence
  Description of Artificial Sequence: Synthetic peptide
DINMNAQER

SEQ ID NO: 45899 - protein, 9 aa, Artificial Sequence
  Description of Artificial Sequence: Synthetic peptide
DIRKDQHKN

SEQ ID NO: 45900 - protein, 9 aa, Artificial Sequence
  Description of Artificial Sequence: Synthetic peptide
DIVIKKCNA

SEQ ID NO: 45901 - protein, 9 aa, Artificial Sequence
  Description of Artificial Sequence: Synthetic peptide
DKASNQHNG

SEQ ID NO: 45902 - protein, 9 aa, Artificial Sequence
  Description of Artificial Sequence: Synthetic peptide
DKFAAHALA

SEQ ID NO: 45903 - protein, 9 aa, Artificial Sequence
  Description of Artificial Sequence: Synthetic peptide
DKGHHNSMH

SEQ ID NO: 45904 - protein, 9 aa, Artificial Sequence
  Description of Artificial Sequence: Synthetic peptide
DKIDFSSVM

SEQ ID NO: 45905 - protein, 9 aa, Artificial Sequence
  Description of Artificial Sequence: Synthetic peptide
DKKFGQFMS

SEQ ID NO: 45906 - protein, 9 aa, Artificial Sequence
  Description of Artificial Sequence: Synthetic peptide
DKKWEEICA

SEQ ID NO: 45907 - protein, 9 aa, Artificial Sequence
  Description of Artificial Sequence: Synthetic peptide
DKLELIGLD

SEQ ID NO: 45908 - protein, 9 aa, Artificial Sequence
  Description of Artificial Sequence: Synthetic peptide
DKNFWVHWF

SEQ ID NO: 45909 - protein, 9 aa, Artificial Sequence
  Description of Artificial Sequence: Synthetic peptide
DKTEMVIID

SEQ ID NO: 45910 - protein, 9 aa, Artificial Sequence
  Description of Artificial Sequence: Synthetic peptide
DLASVGRWN

SEQ ID NO: 45911 - protein, 9 aa, Artificial Sequence
  Description of Artificial Sequence: Synthetic peptide
DLCKMKEDK

SEQ ID NO: 45912 - protein, 9 aa, Artificial Sequence
  Description of Artificial Sequence: Synthetic peptide
DLFRQERLF

SEQ ID NO: 45913 - protein, 9 aa, Artificial Sequence
  Description of Artificial Sequence: Synthetic peptide
DLINWWHLQ

SEQ ID NO: 45914 - protein, 9 aa, Artificial Sequence
  Description of Artificial Sequence: Synthetic peptide
DLKPWNPAW

SEQ ID NO: 45915 - protein, 9 aa, Artificial Sequence
  Description of Artificial Sequence: Synthetic peptide
DLRLKVISR

SEQ ID NO: 45916 - protein, 9 aa, Artificial Sequence
  Description of Artificial Sequence: Synthetic peptide
DLSRSFLAQ

SEQ ID NO: 45917 - protein, 9 aa, Artificial Sequence
  Description of Artificial Sequence: Synthetic peptide
DLVIIYMFH

SEQ ID NO: 45918 - protein, 9 aa, Artificial Sequence
  Description of Artificial Sequence: Synthetic peptide
DMELQFMYA

SEQ ID NO: 45919 - protein, 9 aa, Artificial Sequence
  Description of Artificial Sequence: Synthetic peptide
DMGNYPCFE

SEQ ID NO: 45920 - protein, 9 aa, Artificial Sequence
  Description of Artificial Sequence: Synthetic peptide
DMMLRHCVF

SEQ ID NO: 45921 - protein, 9 aa, Artificial Sequence
  Description of Artificial Sequence: Synthetic peptide
DMRSNLPWH

SEQ ID NO: 45922 - protein, 9 aa, Artificial Sequence
  Description of Artificial Sequence: Synthetic peptide
DMSHECVDA

SEQ ID NO: 45923 - protein, 9 aa, Artificial Sequence
  Description of Artificial Sequence: Synthetic peptide
DMSHECVGA

SEQ ID NO: 45924 - protein, 9 aa, Artificial Sequence
  Description of Artificial Sequence: Synthetic peptide
DMVDLEMYP

SEQ ID NO: 45925 - protein, 9 aa, Artificial Sequence
  Description of Artificial Sequence: Synthetic peptide
DMWDEGDGD

SEQ ID NO: 45926 - protein, 9 aa, Artificial Sequence
  Description of Artificial Sequence: Synthetic peptide
DNADMFNIG

SEQ ID NO: 45927 - protein, 9 aa, Artificial Sequence
  Description of Artificial Sequence: Synthetic peptide
DNAKRPMTI

SEQ ID NO: 45928 - protein, 9 aa, Artificial Sequence
  Description of Artificial Sequence: Synthetic peptide
DNENAIPMG

SEQ ID NO: 45929 - protein, 9 aa, Artificial Sequence
  Description of Artificial Sequence: Synthetic peptide
DNGNMFQQH

SEQ ID NO: 45930 - protein, 9 aa, Artificial Sequence
  Description of Artificial Sequence: Synthetic peptide
DNKLTEPCN

SEQ ID NO: 45931 - protein, 9 aa, Artificial Sequence
  Description of Artificial Sequence: Synthetic peptide
DNKYYMSKC

SEQ ID NO: 45932 - protein, 9 aa, Artificial Sequence
  Description of Artificial Sequence: Synthetic peptide
DNMEFESPG

SEQ ID NO: 45933 - protein, 9 aa, Artificial Sequence
  Description of Artificial Sequence: Synthetic peptide
DNNAMLVCT

SEQ ID NO: 45934 - protein, 9 aa, Artificial Sequence
  Description of Artificial Sequence: Synthetic peptide
DNPVTRCTD

SEQ ID NO: 45935 - protein, 9 aa, Artificial Sequence
  Description of Artificial Sequence: Synthetic peptide
DNSWFVQGG

SEQ ID NO: 45936 - protein, 9 aa, Artificial Sequence
  Description of Artificial Sequence: Synthetic peptide
DNVYTMHQW

SEQ ID NO: 45937 - protein, 9 aa, Artificial Sequence
  Description of Artificial Sequence: Synthetic peptide
DPMYIPVNH

SEQ ID NO: 45938 - protein, 9 aa, Artificial Sequence
  Description of Artificial Sequence: Synthetic peptide
DQCLCHTQA

SEQ ID NO: 45939 - protein, 9 aa, Artificial Sequence
  Description of Artificial Sequence: Synthetic peptide
DQGLWENIP

SEQ ID NO: 45940 - protein, 9 aa, Artificial Sequence
  Description of Artificial Sequence: Synthetic peptide
DQYFEGWRK

SEQ ID NO: 45941 - protein, 9 aa, Artificial Sequence
  Description of Artificial Sequence: Synthetic peptide
DRCVMTDVL

SEQ ID NO: 45942 - protein, 9 aa, Artificial Sequence
  Description of Artificial Sequence: Synthetic peptide
DRFMEFTGA

SEQ ID NO: 45943 - protein, 9 aa, Artificial Sequence
  Description of Artificial Sequence: Synthetic peptide
DRFWSKYKD

SEQ ID NO: 45944 - protein, 9 aa, Artificial Sequence
  Description of Artificial Sequence: Synthetic peptide
DRGMPTNWC

SEQ ID NO: 45945 - protein, 9 aa, Artificial Sequence
  Description of Artificial Sequence: Synthetic peptide
DRGQSFQMF

SEQ ID NO: 45946 - protein, 9 aa, Artificial Sequence
  Description of Artificial Sequence: Synthetic peptide
DRGTVNRDC

SEQ ID NO: 45947 - protein, 9 aa, Artificial Sequence
  Description of Artificial Sequence: Synthetic peptide
DRSILHAHP

SEQ ID NO: 45948 - protein, 9 aa, Artificial Sequence
  Description of Artificial Sequence: Synthetic peptide
DRTIIQNIP

SEQ ID NO: 45949 - protein, 9 aa, Artificial Sequence
  Description of Artificial Sequence: Synthetic peptide
DRTSYPLHL

SEQ ID NO: 45950 - protein, 9 aa, Artificial Sequence
  Description of Artificial Sequence: Synthetic peptide
DSAWYYWHP

SEQ ID NO: 45951 - protein, 9 aa, Artificial Sequence
  Description of Artificial Sequence: Synthetic peptide
DSCHSRIIL

SEQ ID NO: 45952 - protein, 9 aa, Artificial Sequence
  Description of Artificial Sequence: Synthetic peptide
DSELVRDYI

SEQ ID NO: 45953 - protein, 9 aa, Artificial Sequence
  Description of Artificial Sequence: Synthetic peptide
DSIGLFRGG

SEQ ID NO: 45954 - protein, 9 aa, Artificial Sequence
  Description of Artificial Sequence: Synthetic peptide
DSKIAHGRQ

SEQ ID NO: 45955 - protein, 9 aa, Artificial Sequence
  Description of Artificial Sequence: Synthetic peptide
DSLRKYQCR

SEQ ID NO: 45956 - protein, 9 aa, Artificial Sequence
  Description of Artificial Sequence: Synthetic peptide
DSLTVNMAH

SEQ ID NO: 45957 - protein, 9 aa, Artificial Sequence
  Description of Artificial Sequence: Synthetic peptide
DSMAAHCAV

SEQ ID NO: 45958 - protein, 9 aa, Artificial Sequence
  Description of Artificial Sequence: Synthetic peptide
DSNGIAHVP

SEQ ID NO: 45959 - protein, 9 aa, Artificial Sequence
  Description of Artificial Sequence: Synthetic peptide
DSNKWAGLG

SEQ ID NO: 45960 - protein, 9 aa, Artificial Sequence
  Description of Artificial Sequence: Synthetic peptide
DSNTHLPIG

SEQ ID NO: 45961 - protein, 9 aa, Artificial Sequence
  Description of Artificial Sequence: Synthetic peptide
DSPQIVDVY

SEQ ID NO: 45962 - protein, 9 aa, Artificial Sequence
  Description of Artificial Sequence: Synthetic peptide
DSQGINKLH

SEQ ID NO: 45963 - protein, 9 aa, Artificial Sequence
  Description of Artificial Sequence: Synthetic peptide
DSRHSTFCL

SEQ ID NO: 45964 - protein, 9 aa, Artificial Sequence
  Description of Artificial Sequence: Synthetic peptide
DSRHYANFM

SEQ ID NO: 45965 - protein, 9 aa, Artificial Sequence
  Description of Artificial Sequence: Synthetic peptide
DSTPDRSIW

SEQ ID NO: 45966 - protein, 9 aa, Artificial Sequence
  Description of Artificial Sequence: Synthetic peptide
DSTRIITQY

SEQ ID NO: 45967 - protein, 9 aa, Artificial Sequence
  Description of Artificial Sequence: Synthetic peptide
DSYTMNWFY

SEQ ID NO: 45968 - protein, 9 aa, Artificial Sequence
  Description of Artificial Sequence: Synthetic peptide
DTAAEVNMQ

SEQ ID NO: 45969 - protein, 9 aa, Artificial Sequence
  Description of Artificial Sequence: Synthetic peptide
DTAEYRAGY

SEQ ID NO: 45970 - protein, 9 aa, Artificial Sequence
  Description of Artificial Sequence: Synthetic peptide
DTDCARAIG

SEQ ID NO: 45971 - protein, 9 aa, Artificial Sequence
  Description of Artificial Sequence: Synthetic peptide
DTDRQVKQS

SEQ ID NO: 45972 - protein, 9 aa, Artificial Sequence
  Description of Artificial Sequence: Synthetic peptide
DTFEYTNAF

SEQ ID NO: 45973 - protein, 9 aa, Artificial Sequence
  Description of Artificial Sequence: Synthetic peptide
DTKFYKIAY

SEQ ID NO: 45974 - protein, 9 aa, Artificial Sequence
  Description of Artificial Sequence: Synthetic peptide
DTLQRACML

SEQ ID NO: 45975 - protein, 9 aa, Artificial Sequence
  Description of Artificial Sequence: Synthetic peptide
DTLWYVNFA

SEQ ID NO: 45976 - protein, 9 aa, Artificial Sequence
  Description of Artificial Sequence: Synthetic peptide
DTMMMPSSE

SEQ ID NO: 45977 - protein, 9 aa, Artificial Sequence
  Description of Artificial Sequence: Synthetic peptide
DTMTTCYNS

SEQ ID NO: 45978 - protein, 9 aa, Artificial Sequence
  Description of Artificial Sequence: Synthetic peptide
DTQNMKSSK

SEQ ID NO: 45979 - protein, 9 aa, Artificial Sequence
  Description of Artificial Sequence: Synthetic peptide
DTRWWGMYA

SEQ ID NO: 45980 - protein, 9 aa, Artificial Sequence
  Description of Artificial Sequence: Synthetic peptide
DTSSHECCD

SEQ ID NO: 45981 - protein, 9 aa, Artificial Sequence
  Description of Artificial Sequence: Synthetic peptide
DTVHSGWQD

SEQ ID NO: 45982 - protein, 9 aa, Artificial Sequence
  Description of Artificial Sequence: Synthetic peptide
DTVNQQKTW

SEQ ID NO: 45983 - protein, 9 aa, Artificial Sequence
  Description of Artificial Sequence: Synthetic peptide
DVCKKGQCV

SEQ ID NO: 45984 - protein, 9 aa, Artificial Sequence
  Description of Artificial Sequence: Synthetic peptide
DVCSQGQVP

SEQ ID NO: 45985 - protein, 9 aa, Artificial Sequence
  Description of Artificial Sequence: Synthetic peptide
DVEMMIQRA

SEQ ID NO: 45986 - protein, 9 aa, Artificial Sequence
  Description of Artificial Sequence: Synthetic peptide
DVEYYDHCF

SEQ ID NO: 45987 - protein, 9 aa, Artificial Sequence
  Description of Artificial Sequence: Synthetic peptide
DVGYSAVWA

SEQ ID NO: 45988 - protein, 9 aa, Artificial Sequence
  Description of Artificial Sequence: Synthetic peptide
DVKWGTSNL

SEQ ID NO: 45989 - protein, 9 aa, Artificial Sequence
  Description of Artificial Sequence: Synthetic peptide
DVLPMEWCV

SEQ ID NO: 45990 - protein, 9 aa, Artificial Sequence
  Description of Artificial Sequence: Synthetic peptide
DVLWGNRDS

SEQ ID NO: 45991 - protein, 9 aa, Artificial Sequence
  Description of Artificial Sequence: Synthetic peptide
DVMAMAPSC

SEQ ID NO: 45992 - protein, 9 aa, Artificial Sequence
  Description of Artificial Sequence: Synthetic peptide
DVNAGTRFP

SEQ ID NO: 45993 - protein, 9 aa, Artificial Sequence
  Description of Artificial Sequence: Synthetic peptide
DVTDCKWGF

SEQ ID NO: 45994 - protein, 9 aa, Artificial Sequence
  Description of Artificial Sequence: Synthetic peptide
DVWYPEFIG

SEQ ID NO: 45995 - protein, 9 aa, Artificial Sequence
  Description of Artificial Sequence: Synthetic peptide
DWAHWAAYP

SEQ ID NO: 45996 - protein, 9 aa, Artificial Sequence
  Description of Artificial Sequence: Synthetic peptide
DWCTDMTRK

SEQ ID NO: 45997 - protein, 9 aa, Artificial Sequence
  Description of Artificial Sequence: Synthetic peptide
DWHNLVEYP

SEQ ID NO: 45998 - protein, 9 aa, Artificial Sequence
  Description of Artificial Sequence: Synthetic peptide
DWLNLGRYM

SEQ ID NO: 45999 - protein, 9 aa, Artificial Sequence
  Description of Artificial Sequence: Synthetic peptide
DYFREHMCP

SEQ ID NO: 46000 - protein, 9 aa, Artificial Sequence
  Description of Artificial Sequence: Synthetic peptide
DYKLRARNA

SEQ ID NO: 46001 - protein, 9 aa, Artificial Sequence
  Description of Artificial Sequence: Synthetic peptide
DYNGLSVPI

SEQ ID NO: 46002 - protein, 9 aa, Artificial Sequence
  Description of Artificial Sequence: Synthetic peptide
DYYQWDGQI

SEQ ID NO: 46003 - protein, 9 aa, Artificial Sequence
  Description of Artificial Sequence: Synthetic peptide
EADRWSSPN

SEQ ID NO: 46004 - protein, 9 aa, Artificial Sequence
  Description of Artificial Sequence: Synthetic peptide
EAGRQAWTD

SEQ ID NO: 46005 - protein, 9 aa, Artificial Sequence
  Description of Artificial Sequence: Synthetic peptide
EAHLDWIYP

SEQ ID NO: 46006 - protein, 9 aa, Artificial Sequence
  Description of Artificial Sequence: Synthetic peptide
EAHWFTNYN

SEQ ID NO: 46007 - protein, 9 aa, Artificial Sequence
  Description of Artificial Sequence: Synthetic peptide
EAKPWSGYL

SEQ ID NO: 46008 - protein, 9 aa, Artificial Sequence
  Description of Artificial Sequence: Synthetic peptide
EAKRYHVDG

SEQ ID NO: 46009 - protein, 9 aa, Artificial Sequence
  Description of Artificial Sequence: Synthetic peptide
EANMKEGLI

SEQ ID NO: 46010 - protein, 9 aa, Artificial Sequence
  Description of Artificial Sequence: Synthetic peptide
EATIKALVF

SEQ ID NO: 46011 - protein, 9 aa, Artificial Sequence
  Description of Artificial Sequence: Synthetic peptide
EATWTHADE

SEQ ID NO: 46012 - protein, 9 aa, Artificial Sequence
  Description of Artificial Sequence: Synthetic peptide
ECDPRQMMC

SEQ ID NO: 46013 - protein, 9 aa, Artificial Sequence
  Description of Artificial Sequence: Synthetic peptide
ECHQGSNME

SEQ ID NO: 46014 - protein, 9 aa, Artificial Sequence
  Description of Artificial Sequence: Synthetic peptide
ECMDQQATW

SEQ ID NO: 46015 - protein, 9 aa, Artificial Sequence
  Description of Artificial Sequence: Synthetic peptide
ECMQQCFVR

SEQ ID NO: 46016 - protein, 9 aa, Artificial Sequence
  Description of Artificial Sequence: Synthetic peptide
ECQPFATVT

SEQ ID NO: 46017 - protein, 9 aa, Artificial Sequence
  Description of Artificial Sequence: Synthetic peptide
ECVYNPANN

SEQ ID NO: 46018 - protein, 9 aa, Artificial Sequence
  Description of Artificial Sequence: Synthetic peptide
EEKYKDAQW

SEQ ID NO: 46019 - protein, 9 aa, Artificial Sequence
  Description of Artificial Sequence: Synthetic peptide
EEPGSQMTV

SEQ ID NO: 46020 - protein, 9 aa, Artificial Sequence
  Description of Artificial Sequence: Synthetic peptide
EERPWKRDL

SEQ ID NO: 46021 - protein, 9 aa, Artificial Sequence
  Description of Artificial Sequence: Synthetic peptide
EETEGIEPH

SEQ ID NO: 46022 - protein, 9 aa, Artificial Sequence
  Description of Artificial Sequence: Synthetic peptide
EFDAAVIFK

SEQ ID NO: 46023 - protein, 9 aa, Artificial Sequence
  Description of Artificial Sequence: Synthetic peptide
EFGYEHIVP

SEQ ID NO: 46024 - protein, 9 aa, Artificial Sequence
  Description of Artificial Sequence: Synthetic peptide
EFRNSSCTN

SEQ ID NO: 46025 - protein, 9 aa, Artificial Sequence
  Description of Artificial Sequence: Synthetic peptide
EGAHNKFDR

SEQ ID NO: 46026 - protein, 9 aa, Artificial Sequence
  Description of Artificial Sequence: Synthetic peptide
EGCIPGGWS

SEQ ID NO: 46027 - protein, 9 aa, Artificial Sequence
  Description of Artificial Sequence: Synthetic peptide
EGGSCNTQM

SEQ ID NO: 46028 - protein, 9 aa, Artificial Sequence
  Description of Artificial Sequence: Synthetic peptide
EGNFIMGCS

SEQ ID NO: 46029 - protein, 9 aa, Artificial Sequence
  Description of Artificial Sequence: Synthetic peptide
EGNQEGLNM

SEQ ID NO: 46030 - protein, 9 aa, Artificial Sequence
  Description of Artificial Sequence: Synthetic peptide
EGNREGLNM

SEQ ID NO: 46031 - protein, 9 aa, Artificial Sequence
  Description of Artificial Sequence: Synthetic peptide
EGNYMAGLG

SEQ ID NO: 46032 - protein, 9 aa, Artificial Sequence
  Description of Artificial Sequence: Synthetic peptide
EGWHFPAME

SEQ ID NO: 46033 - protein, 9 aa, Artificial Sequence
  Description of Artificial Sequence: Synthetic peptide
EHDGTPFNE

SEQ ID NO: 46034 - protein, 9 aa, Artificial Sequence
  Description of Artificial Sequence: Synthetic peptide
EHDHQPSYA

SEQ ID NO: 46035 - protein, 9 aa, Artificial Sequence
  Description of Artificial Sequence: Synthetic peptide
EHERFCQGR

SEQ ID NO: 46036 - protein, 9 aa, Artificial Sequence
  Description of Artificial Sequence: Synthetic peptide
EHHRRGAFK

SEQ ID NO: 46037 - protein, 9 aa, Artificial Sequence
  Description of Artificial Sequence: Synthetic peptide
EHMFNKDCT

SEQ ID NO: 46038 - protein, 9 aa, Artificial Sequence
  Description of Artificial Sequence: Synthetic peptide
EHQRGHACN

SEQ ID NO: 46039 - protein, 9 aa, Artificial Sequence
  Description of Artificial Sequence: Synthetic peptide
EHSYLLHDT

SEQ ID NO: 46040 - protein, 9 aa, Artificial Sequence
  Description of Artificial Sequence: Synthetic peptide
EICSEINMK

SEQ ID NO: 46041 - protein, 9 aa, Artificial Sequence
  Description of Artificial Sequence: Synthetic peptide
EIEQEEGGC

SEQ ID NO: 46042 - protein, 9 aa, Artificial Sequence
  Description of Artificial Sequence: Synthetic peptide
EIGLYWIKC

SEQ ID NO: 46043 - protein, 9 aa, Artificial Sequence
  Description of Artificial Sequence: Synthetic peptide
EIGYKQMYF

SEQ ID NO: 46044 - protein, 9 aa, Artificial Sequence
  Description of Artificial Sequence: Synthetic peptide
EIKASHNYD

SEQ ID NO: 46045 - protein, 9 aa, Artificial Sequence
  Description of Artificial Sequence: Synthetic peptide
EINQGDEDG

SEQ ID NO: 46046 - protein, 9 aa, Artificial Sequence
  Description of Artificial Sequence: Synthetic peptide
EIQSVMPQP

SEQ ID NO: 46047 - protein, 9 aa, Artificial Sequence
  Description of Artificial Sequence: Synthetic peptide
EISNLRQGF

SEQ ID NO: 46048 - protein, 9 aa, Artificial Sequence
  Description of Artificial Sequence: Synthetic peptide
EISPHKILP

SEQ ID NO: 46049 - protein, 9 aa, Artificial Sequence
  Description of Artificial Sequence: Synthetic peptide
EITGGHASW

SEQ ID NO: 46050 - protein, 9 aa, Artificial Sequence
  Description of Artificial Sequence: Synthetic peptide
EIVWYFQDT

SEQ ID NO: 46051 - protein, 9 aa, Artificial Sequence
  Description of Artificial Sequence: Synthetic peptide
EKAMRNGQA

SEQ ID NO: 46052 - protein, 9 aa, Artificial Sequence
  Description of Artificial Sequence: Synthetic peptide
EKCCCLQWE

SEQ ID NO: 46053 - protein, 9 aa, Artificial Sequence
  Description of Artificial Sequence: Synthetic peptide
EKEIKMLFG

SEQ ID NO: 46054 - protein, 9 aa, Artificial Sequence
  Description of Artificial Sequence: Synthetic peptide
EKGPYWHQH

SEQ ID NO: 46055 - protein, 9 aa, Artificial Sequence
  Description of Artificial Sequence: Synthetic peptide
EKHAMECVS

SEQ ID NO: 46056 - protein, 9 aa, Artificial Sequence
  Description of Artificial Sequence: Synthetic peptide
EKIAPNHQA

SEQ ID NO: 46057 - protein, 9 aa, Artificial Sequence
  Description of Artificial Sequence: Synthetic peptide
EKKMWVYTG

SEQ ID NO: 46058 - protein, 9 aa, Artificial Sequence
  Description of Artificial Sequence: Synthetic peptide
EKLMAYIML

SEQ ID NO: 46059 - protein, 9 aa, Artificial Sequence
  Description of Artificial Sequence: Synthetic peptide
EKLPIQMFN

SEQ ID NO: 46060 - protein, 9 aa, Artificial Sequence
  Description of Artificial Sequence: Synthetic peptide
EKMPWLISN

SEQ ID NO: 46061 - protein, 9 aa, Artificial Sequence
  Description of Artificial Sequence: Synthetic peptide
EKNWYQHIW

SEQ ID NO: 46062 - protein, 9 aa, Artificial Sequence
  Description of Artificial Sequence: Synthetic peptide
EKQTRNQDG

SEQ ID NO: 46063 - protein, 9 aa, Artificial Sequence
  Description of Artificial Sequence: Synthetic peptide
ELHHPIRRS

SEQ ID NO: 46064 - protein, 9 aa, Artificial Sequence
  Description of Artificial Sequence: Synthetic peptide
ELMASNRCH

SEQ ID NO: 46065 - protein, 9 aa, Artificial Sequence
  Description of Artificial Sequence: Synthetic peptide
ELMFVMHGT

SEQ ID NO: 46066 - protein, 9 aa, Artificial Sequence
  Description of Artificial Sequence: Synthetic peptide
ELPMMNMAQ

SEQ ID NO: 46067 - protein, 9 aa, Artificial Sequence
  Description of Artificial Sequence: Synthetic peptide
ELSFKTAQG

SEQ ID NO: 46068 - protein, 9 aa, Artificial Sequence
  Description of Artificial Sequence: Synthetic peptide
ELTMANCMN

SEQ ID NO: 46069 - protein, 9 aa, Artificial Sequence
  Description of Artificial Sequence: Synthetic peptide
EMERKNMFE

SEQ ID NO: 46070 - protein, 9 aa, Artificial Sequence
  Description of Artificial Sequence: Synthetic peptide
EMGCDNKSF

SEQ ID NO: 46071 - protein, 9 aa, Artificial Sequence
  Description of Artificial Sequence: Synthetic peptide
EMHLYHICH

SEQ ID NO: 46072 - protein, 9 aa, Artificial Sequence
  Description of Artificial Sequence: Synthetic peptide
EMTSTMKSH

SEQ ID NO: 46073 - protein, 9 aa, Artificial Sequence
  Description of Artificial Sequence: Synthetic peptide
EMYRALGHG

SEQ ID NO: 46074 - protein, 9 aa, Artificial Sequence
  Description of Artificial Sequence: Synthetic peptide
ENGPMCDSN

SEQ ID NO: 46075 - protein, 9 aa, Artificial Sequence
  Description of Artificial Sequence: Synthetic peptide
ENHSPNVDP

SEQ ID NO: 46076 - protein, 9 aa, Artificial Sequence
  Description of Artificial Sequence: Synthetic peptide
ENILAIPAL

SEQ ID NO: 46077 - protein, 9 aa, Artificial Sequence
  Description of Artificial Sequence: Synthetic peptide
ENKWQPKQA

SEQ ID NO: 46078 - protein, 9 aa, Artificial Sequence
  Description of Artificial Sequence: Synthetic peptide
ENNSRQLIN

SEQ ID NO: 46079 - protein, 9 aa, Artificial Sequence
  Description of Artificial Sequence: Synthetic peptide
EPCMRNLFG

SEQ ID NO: 46080 - protein, 9 aa, Artificial Sequence
  Description of Artificial Sequence: Synthetic peptide
EPIRTEGAE

SEQ ID NO: 46081 - protein, 9 aa, Artificial Sequence
  Description of Artificial Sequence: Synthetic peptide
EPLCHQIMP

SEQ ID NO: 46082 - protein, 9 aa, Artificial Sequence
  Description of Artificial Sequence: Synthetic peptide
EPLVDEFGG

SEQ ID NO: 46083 - protein, 9 aa, Artificial Sequence
  Description of Artificial Sequence: Synthetic peptide
EPRECFHIE

SEQ ID NO: 46084 - protein, 9 aa, Artificial Sequence
  Description of Artificial Sequence: Synthetic peptide
EPWVMKLNK

SEQ ID NO: 46085 - protein, 9 aa, Artificial Sequence
  Description of Artificial Sequence: Synthetic peptide
EQADYRAVQ

SEQ ID NO: 46086 - protein, 9 aa, Artificial Sequence
  Description of Artificial Sequence: Synthetic peptide
EQERYEWDP

SEQ ID NO: 46087 - protein, 9 aa, Artificial Sequence
  Description of Artificial Sequence: Synthetic peptide
EQGCQLVTT

SEQ ID NO: 46088 - protein, 9 aa, Artificial Sequence
  Description of Artificial Sequence: Synthetic peptide
EQHPRMNFH

SEQ ID NO: 46089 - protein, 9 aa, Artificial Sequence
  Description of Artificial Sequence: Synthetic peptide
EQIHQLRFG

SEQ ID NO: 46090 - protein, 9 aa, Artificial Sequence
  Description of Artificial Sequence: Synthetic peptide
EQKWQWCQY

SEQ ID NO: 46091 - protein, 9 aa, Artificial Sequence
  Description of Artificial Sequence: Synthetic peptide
EQQMLLQLS

SEQ ID NO: 46092 - protein, 9 aa, Artificial Sequence
  Description of Artificial Sequence: Synthetic peptide
EQYMVNTRD

SEQ ID NO: 46093 - protein, 9 aa, Artificial Sequence
  Description of Artificial Sequence: Synthetic peptide
ERCPWSVGE

SEQ ID NO: 46094 - protein, 9 aa, Artificial Sequence
  Description of Artificial Sequence: Synthetic peptide
ERENSLWMS

SEQ ID NO: 46095 - protein, 9 aa, Artificial Sequence
  Description of Artificial Sequence: Synthetic peptide
ERFLLEAVE

SEQ ID NO: 46096 - protein, 9 aa, Artificial Sequence
  Description of Artificial Sequence: Synthetic peptide
ERGKWHALS

SEQ ID NO: 46097 - protein, 9 aa, Artificial Sequence
  Description of Artificial Sequence: Synthetic peptide
ERQPFTMQW

SEQ ID NO: 46098 - protein, 9 aa, Artificial Sequence
  Description of Artificial Sequence: Synthetic peptide
ERSWTHAHW

SEQ ID NO: 46099 - protein, 9 aa, Artificial Sequence
  Description of Artificial Sequence: Synthetic peptide
ERTTKAEGY

SEQ ID NO: 46100 - protein, 9 aa, Artificial Sequence
  Description of Artificial Sequence: Synthetic peptide
ERVARLQFT

SEQ ID NO: 46101 - protein, 9 aa, Artificial Sequence
  Description of Artificial Sequence: Synthetic peptide
ESAKFVCEY

SEQ ID NO: 46102 - protein, 9 aa, Artificial Sequence
  Description of Artificial Sequence: Synthetic peptide
ESCEDGIRT

SEQ ID NO: 46103 - protein, 9 aa, Artificial Sequence
  Description of Artificial Sequence: Synthetic peptide
ESGFRKLRV

SEQ ID NO: 46104 - protein, 9 aa, Artificial Sequence
  Description of Artificial Sequence: Synthetic peptide
ESHMHDHWI

SEQ ID NO: 46105 - protein, 9 aa, Artificial Sequence
  Description of Artificial Sequence: Synthetic peptide
ESILVCATP

SEQ ID NO: 46106 - protein, 9 aa, Artificial Sequence
  Description of Artificial Sequence: Synthetic peptide
ESIQLRSSQ

SEQ ID NO: 46107 - protein, 9 aa, Artificial Sequence
  Description of Artificial Sequence: Synthetic peptide
ESSFVHEEQ

SEQ ID NO: 46108 - protein, 9 aa, Artificial Sequence
  Description of Artificial Sequence: Synthetic peptide
ESTEPMSAT

SEQ ID NO: 46109 - protein, 9 aa, Artificial Sequence
  Description of Artificial Sequence: Synthetic peptide
ESTLKTTYA

SEQ ID NO: 46110 - protein, 9 aa, Artificial Sequence
  Description of Artificial Sequence: Synthetic peptide
ETCTEPKYW

SEQ ID NO: 46111 - protein, 9 aa, Artificial Sequence
  Description of Artificial Sequence: Synthetic peptide
ETEMTSWQN

SEQ ID NO: 46112 - protein, 9 aa, Artificial Sequence
  Description of Artificial Sequence: Synthetic peptide
ETKAVISAQ

SEQ ID NO: 46113 - protein, 9 aa, Artificial Sequence
  Description of Artificial Sequence: Synthetic peptide
ETLERDWDY

SEQ ID NO: 46114 - protein, 9 aa, Artificial Sequence
  Description of Artificial Sequence: Synthetic peptide
ETMKDVRFM

SEQ ID NO: 46115 - protein, 9 aa, Artificial Sequence
  Description of Artificial Sequence: Synthetic peptide
ETNQLSGYC

SEQ ID NO: 46116 - protein, 9 aa, Artificial Sequence
  Description of Artificial Sequence: Synthetic peptide
ETPKFNWSN

SEQ ID NO: 46117 - protein, 9 aa, Artificial Sequence
  Description of Artificial Sequence: Synthetic peptide
ETRTDVPML

SEQ ID NO: 46118 - protein, 9 aa, Artificial Sequence
  Description of Artificial Sequence: Synthetic peptide
ETTAAFKPG

SEQ ID NO: 46119 - protein, 9 aa, Artificial Sequence
  Description of Artificial Sequence: Synthetic peptide
ETYDNNLQA

SEQ ID NO: 46120 - protein, 9 aa, Artificial Sequence
  Description of Artificial Sequence: Synthetic peptide
ETYVCWFGS

SEQ ID NO: 46121 - protein, 9 aa, Artificial Sequence
  Description of Artificial Sequence: Synthetic peptide
EVATSYARV

SEQ ID NO: 46122 - protein, 9 aa, Artificial Sequence
  Description of Artificial Sequence: Synthetic peptide
EVDQAPMMI

SEQ ID NO: 46123 - protein, 9 aa, Artificial Sequence
  Description of Artificial Sequence: Synthetic peptide
EVHRSELQR

SEQ ID NO: 46124 - protein, 9 aa, Artificial Sequence
  Description of Artificial Sequence: Synthetic peptide
EVIGFLYHA

SEQ ID NO: 46125 - protein, 9 aa, Artificial Sequence
  Description of Artificial Sequence: Synthetic peptide
EVMAMCDRY

SEQ ID NO: 46126 - protein, 9 aa, Artificial Sequence
  Description of Artificial Sequence: Synthetic peptide
EVMPMCDRY

SEQ ID NO: 46127 - protein, 9 aa, Artificial Sequence
  Description of Artificial Sequence: Synthetic peptide
EVQLTYLHE

SEQ ID NO: 46128 - protein, 9 aa, Artificial Sequence
  Description of Artificial Sequence: Synthetic peptide
EVVTKHDSR

SEQ ID NO: 46129 - protein, 9 aa, Artificial Sequence
  Description of Artificial Sequence: Synthetic peptide
EWCKQWMRF

SEQ ID NO: 46130 - protein, 9 aa, Artificial Sequence
  Description of Artificial Sequence: Synthetic peptide
EWMTCGVSG

SEQ ID NO: 46131 - protein, 9 aa, Artificial Sequence
  Description of Artificial Sequence: Synthetic peptide
EWSMLQYNH

SEQ ID NO: 46132 - protein, 9 aa, Artificial Sequence
  Description of Artificial Sequence: Synthetic peptide
EWYIANISD

SEQ ID NO: 46133 - protein, 9 aa, Artificial Sequence
  Description of Artificial Sequence: Synthetic peptide
EYELTQPAP

SEQ ID NO: 46134 - protein, 9 aa, Artificial Sequence
  Description of Artificial Sequence: Synthetic peptide
EYIFENEMC

SEQ ID NO: 46135 - protein, 9 aa, Artificial Sequence
  Description of Artificial Sequence: Synthetic peptide
EYLLCRGEA

SEQ ID NO: 46136 - protein, 9 aa, Artificial Sequence
  Description of Artificial Sequence: Synthetic peptide
FADHFEAMF

SEQ ID NO: 46137 - protein, 9 aa, Artificial Sequence
  Description of Artificial Sequence: Synthetic peptide
FAEHEIEHS

SEQ ID NO: 46138 - protein, 9 aa, Artificial Sequence
  Description of Artificial Sequence: Synthetic peptide
FAIIRNDSH

SEQ ID NO: 46139 - protein, 9 aa, Artificial Sequence
  Description of Artificial Sequence: Synthetic peptide
FAIMSSDHP

SEQ ID NO: 46140 - protein, 9 aa, Artificial Sequence
  Description of Artificial Sequence: Synthetic peptide
FALNTEISA

SEQ ID NO: 46141 - protein, 9 aa, Artificial Sequence
  Description of Artificial Sequence: Synthetic peptide
FAPFLKAGH

SEQ ID NO: 46142 - protein, 9 aa, Artificial Sequence
  Description of Artificial Sequence: Synthetic peptide
FAQMNKDRC

SEQ ID NO: 46143 - protein, 9 aa, Artificial Sequence
  Description of Artificial Sequence: Synthetic peptide
FARHPLKCA

SEQ ID NO: 46144 - protein, 9 aa, Artificial Sequence
  Description of Artificial Sequence: Synthetic peptide
FASQHAVQA

SEQ ID NO: 46145 - protein, 9 aa, Artificial Sequence
  Description of Artificial Sequence: Synthetic peptide
FCFWMPTTN

SEQ ID NO: 46146 - protein, 9 aa, Artificial Sequence
  Description of Artificial Sequence: Synthetic peptide
FCGKLTHVG

SEQ ID NO: 46147 - protein, 9 aa, Artificial Sequence
  Description of Artificial Sequence: Synthetic peptide
FDWRCGCWS

SEQ ID NO: 46148 - protein, 9 aa, Artificial Sequence
  Description of Artificial Sequence: Synthetic peptide
FEQPPMHHQ

SEQ ID NO: 46149 - protein, 9 aa, Artificial Sequence
  Description of Artificial Sequence: Synthetic peptide
FEVTMTVPE

SEQ ID NO: 46150 - protein, 9 aa, Artificial Sequence
  Description of Artificial Sequence: Synthetic peptide
FFQRFLSAW

SEQ ID NO: 46151 - protein, 9 aa, Artificial Sequence
  Description of Artificial Sequence: Synthetic peptide
FGAMTSDTI

SEQ ID NO: 46152 - protein, 9 aa, Artificial Sequence
  Description of Artificial Sequence: Synthetic peptide
FGAYYNDRG

SEQ ID NO: 46153 - protein, 9 aa, Artificial Sequence
  Description of Artificial Sequence: Synthetic peptide
FGETYNHSH

SEQ ID NO: 46154 - protein, 9 aa, Artificial Sequence
  Description of Artificial Sequence: Synthetic peptide
FGEWITFYF

SEQ ID NO: 46155 - protein, 9 aa, Artificial Sequence
  Description of Artificial Sequence: Synthetic peptide
FGHKIEAPH

SEQ ID NO: 46156 - protein, 9 aa, Artificial Sequence
  Description of Artificial Sequence: Synthetic peptide
FGQHVWQGF

SEQ ID NO: 46157 - protein, 9 aa, Artificial Sequence
  Description of Artificial Sequence: Synthetic peptide
FGRYFQFDL

SEQ ID NO: 46158 - protein, 9 aa, Artificial Sequence
  Description of Artificial Sequence: Synthetic peptide
FGWWYKTFT

SEQ ID NO: 46159 - protein, 9 aa, Artificial Sequence
  Description of Artificial Sequence: Synthetic peptide
FHAPTECMA

SEQ ID NO: 46160 - protein, 9 aa, Artificial Sequence
  Description of Artificial Sequence: Synthetic peptide
FHFQFTMDK

SEQ ID NO: 46161 - protein, 9 aa, Artificial Sequence
  Description of Artificial Sequence: Synthetic peptide
FHHLFDCNL

SEQ ID NO: 46162 - protein, 9 aa, Artificial Sequence
  Description of Artificial Sequence: Synthetic peptide
FHLACIHAQ

SEQ ID NO: 46163 - protein, 9 aa, Artificial Sequence
  Description of Artificial Sequence: Synthetic peptide
FHMTRYKMT

SEQ ID NO: 46164 - protein, 9 aa, Artificial Sequence
  Description of Artificial Sequence: Synthetic peptide
FHRPSEGQE

SEQ ID NO: 46165 - protein, 9 aa, Artificial Sequence
  Description of Artificial Sequence: Synthetic peptide
FIRLFMKLN

SEQ ID NO: 46166 - protein, 9 aa, Artificial Sequence
  Description of Artificial Sequence: Synthetic peptide
FKECTNGMH

SEQ ID NO: 46167 - protein, 9 aa, Artificial Sequence
  Description of Artificial Sequence: Synthetic peptide
FKMATAECP

SEQ ID NO: 46168 - protein, 9 aa, Artificial Sequence
  Description of Artificial Sequence: Synthetic peptide
FKPCKDDDV

SEQ ID NO: 46169 - protein, 9 aa, Artificial Sequence
  Description of Artificial Sequence: Synthetic peptide
FKVTEYELP

SEQ ID NO: 46170 - protein, 9 aa, Artificial Sequence
  Description of Artificial Sequence: Synthetic peptide
FMDEIAVTM

SEQ ID NO: 46171 - protein, 9 aa, Artificial Sequence
  Description of Artificial Sequence: Synthetic peptide
FMGFMGVMG

SEQ ID NO: 46172 - protein, 9 aa, Artificial Sequence
  Description of Artificial Sequence: Synthetic peptide
FMQIWNKYS

SEQ ID NO: 46173 - protein, 9 aa, Artificial Sequence
  Description of Artificial Sequence: Synthetic peptide
FMRMEMMGQ

SEQ ID NO: 46174 - protein, 9 aa, Artificial Sequence
  Description of Artificial Sequence: Synthetic peptide
FMRPFLEPD

SEQ ID NO: 46175 - protein, 9 aa, Artificial Sequence
  Description of Artificial Sequence: Synthetic peptide
FNFCFNHQF

SEQ ID NO: 46176 - protein, 9 aa, Artificial Sequence
  Description of Artificial Sequence: Synthetic peptide
FNGIDQMRY

SEQ ID NO: 46177 - protein, 9 aa, Artificial Sequence
  Description of Artificial Sequence: Synthetic peptide
FNMLLQVNR

SEQ ID NO: 46178 - protein, 9 aa, Artificial Sequence
  Description of Artificial Sequence: Synthetic peptide
FNTTCQMSI

SEQ ID NO: 46179 - protein, 9 aa, Artificial Sequence
  Description of Artificial Sequence: Synthetic peptide
FPICNQERI

SEQ ID NO: 46180 - protein, 9 aa, Artificial Sequence
  Description of Artificial Sequence: Synthetic peptide
FPQPPCTYA

SEQ ID NO: 46181 - protein, 9 aa, Artificial Sequence
  Description of Artificial Sequence: Synthetic peptide
FPTNQNDPH

SEQ ID NO: 46182 - protein, 9 aa, Artificial Sequence
  Description of Artificial Sequence: Synthetic peptide
FPTQMHYNA

SEQ ID NO: 46183 - protein, 9 aa, Artificial Sequence
  Description of Artificial Sequence: Synthetic peptide
FQAKMHTLA

SEQ ID NO: 46184 - protein, 9 aa, Artificial Sequence
  Description of Artificial Sequence: Synthetic peptide
FQDWPVTWC

SEQ ID NO: 46185 - protein, 9 aa, Artificial Sequence
  Description of Artificial Sequence: Synthetic peptide
FQQQTGTRC

SEQ ID NO: 46186 - protein, 9 aa, Artificial Sequence
  Description of Artificial Sequence: Synthetic peptide
FRFSTQHEA

SEQ ID NO: 46187 - protein, 9 aa, Artificial Sequence
  Description of Artificial Sequence: Synthetic peptide
FRLNLLKTN

SEQ ID NO: 46188 - protein, 9 aa, Artificial Sequence
  Description of Artificial Sequence: Synthetic peptide
FSEVTLQES

SEQ ID NO: 46189 - protein, 9 aa, Artificial Sequence
  Description of Artificial Sequence: Synthetic peptide
FSKTGHCKF

SEQ ID NO: 46190 - protein, 9 aa, Artificial Sequence
  Description of Artificial Sequence: Synthetic peptide
FSQCPITCC

SEQ ID NO: 46191 - protein, 9 aa, Artificial Sequence
  Description of Artificial Sequence: Synthetic peptide
FSQGPGMHF

SEQ ID NO: 46192 - protein, 9 aa, Artificial Sequence
  Description of Artificial Sequence: Synthetic peptide
FSQHQEHMR

SEQ ID NO: 46193 - protein, 9 aa, Artificial Sequence
  Description of Artificial Sequence: Synthetic peptide
FSQRVEKTW

SEQ ID NO: 46194 - protein, 9 aa, Artificial Sequence
  Description of Artificial Sequence: Synthetic peptide
FSSEAADYD

SEQ ID NO: 46195 - protein, 9 aa, Artificial Sequence
  Description of Artificial Sequence: Synthetic peptide
FSTFTKPSP

SEQ ID NO: 46196 - protein, 9 aa, Artificial Sequence
  Description of Artificial Sequence: Synthetic peptide
FSVPLGATT

SEQ ID NO: 46197 - protein, 9 aa, Artificial Sequence
  Description of Artificial Sequence: Synthetic peptide
FSVSAQHSC

SEQ ID NO: 46198 - protein, 9 aa, Artificial Sequence
  Description of Artificial Sequence: Synthetic peptide
FTFRVGEVN

SEQ ID NO: 46199 - protein, 9 aa, Artificial Sequence
  Description of Artificial Sequence: Synthetic peptide
FTHGSVLHD

SEQ ID NO: 46200 - protein, 9 aa, Artificial Sequence
  Description of Artificial Sequence: Synthetic peptide
FTMLGMEAI

SEQ ID NO: 46201 - protein, 9 aa, Artificial Sequence
  Description of Artificial Sequence: Synthetic peptide
FTNPHAFYP

SEQ ID NO: 46202 - protein, 9 aa, Artificial Sequence
  Description of Artificial Sequence: Synthetic peptide
FTQHIVGET

SEQ ID NO: 46203 - protein, 9 aa, Artificial Sequence
  Description of Artificial Sequence: Synthetic peptide
FTTKYVYFD

SEQ ID NO: 46204 - protein, 9 aa, Artificial Sequence
  Description of Artificial Sequence: Synthetic peptide
FVDHYYGHQ

SEQ ID NO: 46205 - protein, 9 aa, Artificial Sequence
  Description of Artificial Sequence: Synthetic peptide
FVNHTRCNP

SEQ ID NO: 46206 - protein, 9 aa, Artificial Sequence
  Description of Artificial Sequence: Synthetic peptide
FVRHDVIGQ

SEQ ID NO: 46207 - protein, 9 aa, Artificial Sequence
  Description of Artificial Sequence: Synthetic peptide
FVTHWEYYP

SEQ ID NO: 46208 - protein, 9 aa, Artificial Sequence
  Description of Artificial Sequence: Synthetic peptide
FVTMMQIAF

SEQ ID NO: 46209 - protein, 9 aa, Artificial Sequence
  Description of Artificial Sequence: Synthetic peptide
FVTMRYEGH

SEQ ID NO: 46210 - protein, 9 aa, Artificial Sequence
  Description of Artificial Sequence: Synthetic peptide
FWTSYTTNP

SEQ ID NO: 46211 - protein, 9 aa, Artificial Sequence
  Description of Artificial Sequence: Synthetic peptide
FYGQNYWWY

SEQ ID NO: 46212 - protein, 9 aa, Artificial Sequence
  Description of Artificial Sequence: Synthetic peptide
FYPRSWPQA

SEQ ID NO: 46213 - protein, 9 aa, Artificial Sequence
  Description of Artificial Sequence: Synthetic peptide
GAARYGYNI

SEQ ID NO: 46214 - protein, 9 aa, Artificial Sequence
  Description of Artificial Sequence: Synthetic peptide
GADSSGGWN

SEQ ID NO: 46215 - protein, 9 aa, Artificial Sequence
  Description of Artificial Sequence: Synthetic peptide
GAFIRDFDI

SEQ ID NO: 46216 - protein, 9 aa, Artificial Sequence
  Description of Artificial Sequence: Synthetic peptide
GAGSVQEIH

SEQ ID NO: 46217 - protein, 9 aa, Artificial Sequence
  Description of Artificial Sequence: Synthetic peptide
GAGTTMRPD

SEQ ID NO: 46218 - protein, 9 aa, Artificial Sequence
  Description of Artificial Sequence: Synthetic peptide
GAHWWGGCV

SEQ ID NO: 46219 - protein, 9 aa, Artificial Sequence
  Description of Artificial Sequence: Synthetic peptide
GAIPLLNWL

SEQ ID NO: 46220 - protein, 9 aa, Artificial Sequence
  Description of Artificial Sequence: Synthetic peptide
GAKMQIAFW

SEQ ID NO: 46221 - protein, 9 aa, Artificial Sequence
  Description of Artificial Sequence: Synthetic peptide
GAKQHMPCY

SEQ ID NO: 46222 - protein, 9 aa, Artificial Sequence
  Description of Artificial Sequence: Synthetic peptide
GAVNSEVCE

SEQ ID NO: 46223 - protein, 9 aa, Artificial Sequence
  Description of Artificial Sequence: Synthetic peptide
GCCWSYYCG

SEQ ID NO: 46224 - protein, 9 aa, Artificial Sequence
  Description of Artificial Sequence: Synthetic peptide
GCDTTKFDA

SEQ ID NO: 46225 - protein, 9 aa, Artificial Sequence
  Description of Artificial Sequence: Synthetic peptide
GCFIYWKDS

SEQ ID NO: 46226 - protein, 9 aa, Artificial Sequence
  Description of Artificial Sequence: Synthetic peptide
GCVKDRCWM

SEQ ID NO: 46227 - protein, 9 aa, Artificial Sequence
  Description of Artificial Sequence: Synthetic peptide
GCWNERCQN

SEQ ID NO: 46228 - protein, 9 aa, Artificial Sequence
  Description of Artificial Sequence: Synthetic peptide
GCYWACWLT

SEQ ID NO: 46229 - protein, 9 aa, Artificial Sequence
  Description of Artificial Sequence: Synthetic peptide
GDNYTAWVG

SEQ ID NO: 46230 - protein, 9 aa, Artificial Sequence
  Description of Artificial Sequence: Synthetic peptide
GEFMMFDRG

SEQ ID NO: 46231 - protein, 9 aa, Artificial Sequence
  Description of Artificial Sequence: Synthetic peptide
GEGWNDDLG

SEQ ID NO: 46232 - protein, 9 aa, Artificial Sequence
  Description of Artificial Sequence: Synthetic peptide
GEREYWNWE

SEQ ID NO: 46233 - protein, 9 aa, Artificial Sequence
  Description of Artificial Sequence: Synthetic peptide
GFACLDHFD

SEQ ID NO: 46234 - protein, 9 aa, Artificial Sequence
  Description of Artificial Sequence: Synthetic peptide
GFDIVLKDF

SEQ ID NO: 46235 - protein, 9 aa, Artificial Sequence
  Description of Artificial Sequence: Synthetic peptide
GFELNMRIS

SEQ ID NO: 46236 - protein, 9 aa, Artificial Sequence
  Description of Artificial Sequence: Synthetic peptide
GFGNTFCIT

SEQ ID NO: 46237 - protein, 9 aa, Artificial Sequence
  Description of Artificial Sequence: Synthetic peptide
GFGTVSMER

SEQ ID NO: 46238 - protein, 9 aa, Artificial Sequence
  Description of Artificial Sequence: Synthetic peptide
GFGYMWCKG

SEQ ID NO: 46239 - protein, 9 aa, Artificial Sequence
  Description of Artificial Sequence: Synthetic peptide
GFLLTYGED

SEQ ID NO: 46240 - protein, 9 aa, Artificial Sequence
  Description of Artificial Sequence: Synthetic peptide
GFMIGNQYL

SEQ ID NO: 46241 - protein, 9 aa, Artificial Sequence
  Description of Artificial Sequence: Synthetic peptide
GFRVIISNW

SEQ ID NO: 46242 - protein, 9 aa, Artificial Sequence
  Description of Artificial Sequence: Synthetic peptide
GFSCLICFD

SEQ ID NO: 46243 - protein, 9 aa, Artificial Sequence
  Description of Artificial Sequence: Synthetic peptide
GFTQTCMTN

SEQ ID NO: 46244 - protein, 9 aa, Artificial Sequence
  Description of Artificial Sequence: Synthetic peptide
GGLLYIECY

SEQ ID NO: 46245 - protein, 9 aa, Artificial Sequence
  Description of Artificial Sequence: Synthetic peptide
GGTIDGHVG

SEQ ID NO: 46246 - protein, 9 aa, Artificial Sequence
  Description of Artificial Sequence: Synthetic peptide
GGVKFNNWW

SEQ ID NO: 46247 - protein, 9 aa, Artificial Sequence
  Description of Artificial Sequence: Synthetic peptide
GHMFVNIDQ

SEQ ID NO: 46248 - protein, 9 aa, Artificial Sequence
  Description of Artificial Sequence: Synthetic peptide
GHMMMMECW

SEQ ID NO: 46249 - protein, 9 aa, Artificial Sequence
  Description of Artificial Sequence: Synthetic peptide
GHSLTMRAH

SEQ ID NO: 46250 - protein, 9 aa, Artificial Sequence
  Description of Artificial Sequence: Synthetic peptide
GHTARDIHA

SEQ ID NO: 46251 - protein, 9 aa, Artificial Sequence
  Description of Artificial Sequence: Synthetic peptide
GHTHSQPAA

SEQ ID NO: 46252 - protein, 9 aa, Artificial Sequence
  Description of Artificial Sequence: Synthetic peptide
GHTPGGSFY

SEQ ID NO: 46253 - protein, 9 aa, Artificial Sequence
  Description of Artificial Sequence: Synthetic peptide
GIANTSDSY

SEQ ID NO: 46254 - protein, 9 aa, Artificial Sequence
  Description of Artificial Sequence: Synthetic peptide
GICCILWDR

SEQ ID NO: 46255 - protein, 9 aa, Artificial Sequence
  Description of Artificial Sequence: Synthetic peptide
GIDSMVIQR

SEQ ID NO: 46256 - protein, 9 aa, Artificial Sequence
  Description of Artificial Sequence: Synthetic peptide
GIHEIMVQR

SEQ ID NO: 46257 - protein, 9 aa, Artificial Sequence
  Description of Artificial Sequence: Synthetic peptide
GIHMVTAMS

SEQ ID NO: 46258 - protein, 9 aa, Artificial Sequence
  Description of Artificial Sequence: Synthetic peptide
GIKFTQQDL

SEQ ID NO: 46259 - protein, 9 aa, Artificial Sequence
  Description of Artificial Sequence: Synthetic peptide
GILRQIEKP

SEQ ID NO: 46260 - protein, 9 aa, Artificial Sequence
  Description of Artificial Sequence: Synthetic peptide
GISICGQNW

SEQ ID NO: 46261 - protein, 9 aa, Artificial Sequence
  Description of Artificial Sequence: Synthetic peptide
GKDTPNSFP

SEQ ID NO: 46262 - protein, 9 aa, Artificial Sequence
  Description of Artificial Sequence: Synthetic peptide
GKGEVLAVA

SEQ ID NO: 46263 - protein, 9 aa, Artificial Sequence
  Description of Artificial Sequence: Synthetic peptide
GKGTMEFGN

SEQ ID NO: 46264 - protein, 9 aa, Artificial Sequence
  Description of Artificial Sequence: Synthetic peptide
GKGYGQHDG

SEQ ID NO: 46265 - protein, 9 aa, Artificial Sequence
  Description of Artificial Sequence: Synthetic peptide
GKILWMSAR

SEQ ID NO: 46266 - protein, 9 aa, Artificial Sequence
  Description of Artificial Sequence: Synthetic peptide
GKMQVLHSA

SEQ ID NO: 46267 - protein, 9 aa, Artificial Sequence
  Description of Artificial Sequence: Synthetic peptide
GKNMLIDGG

SEQ ID NO: 46268 - protein, 9 aa, Artificial Sequence
  Description of Artificial Sequence: Synthetic peptide
GKPYTQIIR

SEQ ID NO: 46269 - protein, 9 aa, Artificial Sequence
  Description of Artificial Sequence: Synthetic peptide
GKSTCKRDV

SEQ ID NO: 46270 - protein, 9 aa, Artificial Sequence
  Description of Artificial Sequence: Synthetic peptide
GLEMRNQAM

SEQ ID NO: 46271 - protein, 9 aa, Artificial Sequence
  Description of Artificial Sequence: Synthetic peptide
GLFQQAMQG

SEQ ID NO: 46272 - protein, 9 aa, Artificial Sequence
  Description of Artificial Sequence: Synthetic peptide
GLGCLMQGN

SEQ ID NO: 46273 - protein, 9 aa, Artificial Sequence
  Description of Artificial Sequence: Synthetic peptide
GLSVGQRIE

SEQ ID NO: 46274 - protein, 9 aa, Artificial Sequence
  Description of Artificial Sequence: Synthetic peptide
GLYERLACC

SEQ ID NO: 46275 - protein, 9 aa, Artificial Sequence
  Description of Artificial Sequence: Synthetic peptide
GMHYSQCQH

SEQ ID NO: 46276 - protein, 9 aa, Artificial Sequence
  Description of Artificial Sequence: Synthetic peptide
GMKAVFIGD

SEQ ID NO: 46277 - protein, 9 aa, Artificial Sequence
  Description of Artificial Sequence: Synthetic peptide
GMWVNHGAK

SEQ ID NO: 46278 - protein, 9 aa, Artificial Sequence
  Description of Artificial Sequence: Synthetic peptide
GNEHCVKYA

SEQ ID NO: 46279 - protein, 9 aa, Artificial Sequence
  Description of Artificial Sequence: Synthetic peptide
GNEKIERYD

SEQ ID NO: 46280 - protein, 9 aa, Artificial Sequence
  Description of Artificial Sequence: Synthetic peptide
GNEMPNYGG

SEQ ID NO: 46281 - protein, 9 aa, Artificial Sequence
  Description of Artificial Sequence: Synthetic peptide
GNHVNYNMH

SEQ ID NO: 46282 - protein, 9 aa, Artificial Sequence
  Description of Artificial Sequence: Synthetic peptide
GPEKLTWGP

SEQ ID NO: 46283 - protein, 9 aa, Artificial Sequence
  Description of Artificial Sequence: Synthetic peptide
GPPHYRNPE

SEQ ID NO: 46284 - protein, 9 aa, Artificial Sequence
  Description of Artificial Sequence: Synthetic peptide
GQFIFDEFV

SEQ ID NO: 46285 - protein, 9 aa, Artificial Sequence
  Description of Artificial Sequence: Synthetic peptide
GQGFMLWNG

SEQ ID NO: 46286 - protein, 9 aa, Artificial Sequence
  Description of Artificial Sequence: Synthetic peptide
GQGKNWVSW

SEQ ID NO: 46287 - protein, 9 aa, Artificial Sequence
  Description of Artificial Sequence: Synthetic peptide
GQGMCDRKT

SEQ ID NO: 46288 - protein, 9 aa, Artificial Sequence
  Description of Artificial Sequence: Synthetic peptide
GQLNCMKGS

SEQ ID NO: 46289 - protein, 9 aa, Artificial Sequence
  Description of Artificial Sequence: Synthetic peptide
GQQENPVFT

SEQ ID NO: 46290 - protein, 9 aa, Artificial Sequence
  Description of Artificial Sequence: Synthetic peptide
GQTSPLMYP

SEQ ID NO: 46291 - protein, 9 aa, Artificial Sequence
  Description of Artificial Sequence: Synthetic peptide
GRAPMCAAA

SEQ ID NO: 46292 - protein, 9 aa, Artificial Sequence
  Description of Artificial Sequence: Synthetic peptide
GRLVVHQFK

SEQ ID NO: 46293 - protein, 9 aa, Artificial Sequence
  Description of Artificial Sequence: Synthetic peptide
GRNMFLWWW

SEQ ID NO: 46294 - protein, 9 aa, Artificial Sequence
  Description of Artificial Sequence: Synthetic peptide
GRSLSQSEW

SEQ ID NO: 46295 - protein, 9 aa, Artificial Sequence
  Description of Artificial Sequence: Synthetic peptide
GRYQSSQFC

SEQ ID NO: 46296 - protein, 9 aa, Artificial Sequence
  Description of Artificial Sequence: Synthetic peptide
GSASHNVWY

SEQ ID NO: 46297 - protein, 9 aa, Artificial Sequence
  Description of Artificial Sequence: Synthetic peptide
GSDYWLCDK

SEQ ID NO: 46298 - protein, 9 aa, Artificial Sequence
  Description of Artificial Sequence: Synthetic peptide
GSFYAQYEE

SEQ ID NO: 46299 - protein, 9 aa, Artificial Sequence
  Description of Artificial Sequence: Synthetic peptide
GSFYCQWNN

SEQ ID NO: 46300 - protein, 9 aa, Artificial Sequence
  Description of Artificial Sequence: Synthetic peptide
GSGKMWQED

SEQ ID NO: 46301 - protein, 9 aa, Artificial Sequence
  Description of Artificial Sequence: Synthetic peptide
GSLLFNPEE

SEQ ID NO: 46302 - protein, 9 aa, Artificial Sequence
  Description of Artificial Sequence: Synthetic peptide
GSMKEMMMR

SEQ ID NO: 46303 - protein, 9 aa, Artificial Sequence
  Description of Artificial Sequence: Synthetic peptide
GSMVASSWC

SEQ ID NO: 46304 - protein, 9 aa, Artificial Sequence
  Description of Artificial Sequence: Synthetic peptide
GSNQRDCSR

SEQ ID NO: 46305 - protein, 9 aa, Artificial Sequence
  Description of Artificial Sequence: Synthetic peptide
GSRPTPADW

SEQ ID NO: 46306 - protein, 9 aa, Artificial Sequence
  Description of Artificial Sequence: Synthetic peptide
GSSHYMEFY

SEQ ID NO: 46307 - protein, 9 aa, Artificial Sequence
  Description of Artificial Sequence: Synthetic peptide
GSYTKPTNV

SEQ ID NO: 46308 - protein, 9 aa, Artificial Sequence
  Description of Artificial Sequence: Synthetic peptide
GTAHNVFMG

SEQ ID NO: 46309 - protein, 9 aa, Artificial Sequence
  Description of Artificial Sequence: Synthetic peptide
GTCLDQTGC

SEQ ID NO: 46310 - protein, 9 aa, Artificial Sequence
  Description of Artificial Sequence: Synthetic peptide
GTETHCDFE

SEQ ID NO: 46311 - protein, 9 aa, Artificial Sequence
  Description of Artificial Sequence: Synthetic peptide
GTGAFTQVP

SEQ ID NO: 46312 - protein, 9 aa, Artificial Sequence
  Description of Artificial Sequence: Synthetic peptide
GTIAFSDNN

SEQ ID NO: 46313 - protein, 9 aa, Artificial Sequence
  Description of Artificial Sequence: Synthetic peptide
GTIPMNCFW

SEQ ID NO: 46314 - protein, 9 aa, Artificial Sequence
  Description of Artificial Sequence: Synthetic peptide
GTKMFQESI

SEQ ID NO: 46315 - protein, 9 aa, Artificial Sequence
  Description of Artificial Sequence: Synthetic peptide
GTMFWGWTG

SEQ ID NO: 46316 - protein, 9 aa, Artificial Sequence
  Description of Artificial Sequence: Synthetic peptide
GTNNIINVR

SEQ ID NO: 46317 - protein, 9 aa, Artificial Sequence
  Description of Artificial Sequence: Synthetic peptide
GTQHFWMDH

SEQ ID NO: 46318 - protein, 9 aa, Artificial Sequence
  Description of Artificial Sequence: Synthetic peptide
GTRWIHDMA

SEQ ID NO: 46319 - protein, 9 aa, Artificial Sequence
  Description of Artificial Sequence: Synthetic peptide
GTSQEKRGQ

SEQ ID NO: 46320 - protein, 9 aa, Artificial Sequence
  Description of Artificial Sequence: Synthetic peptide
GVAAVGLYK

SEQ ID NO: 46321 - protein, 9 aa, Artificial Sequence
  Description of Artificial Sequence: Synthetic peptide
GVIVPISRS

SEQ ID NO: 46322 - protein, 9 aa, Artificial Sequence
  Description of Artificial Sequence: Synthetic peptide
GVLKQANQQ

SEQ ID NO: 46323 - protein, 9 aa, Artificial Sequence
  Description of Artificial Sequence: Synthetic peptide
GVQNTALPR

SEQ ID NO: 46324 - protein, 9 aa, Artificial Sequence
  Description of Artificial Sequence: Synthetic peptide
GVTSPVGTC

SEQ ID NO: 46325 - protein, 9 aa, Artificial Sequence
  Description of Artificial Sequence: Synthetic peptide
GVVDNQQCL

SEQ ID NO: 46326 - protein, 9 aa, Artificial Sequence
  Description of Artificial Sequence: Synthetic peptide
GVWPHYENK

SEQ ID NO: 46327 - protein, 9 aa, Artificial Sequence
  Description of Artificial Sequence: Synthetic peptide
GWCITKARN

SEQ ID NO: 46328 - protein, 9 aa, Artificial Sequence
  Description of Artificial Sequence: Synthetic peptide
GWDHFMQNT

SEQ ID NO: 46329 - protein, 9 aa, Artificial Sequence
  Description of Artificial Sequence: Synthetic peptide
GWMDYIAAH

SEQ ID NO: 46330 - protein, 9 aa, Artificial Sequence
  Description of Artificial Sequence: Synthetic peptide
GWYNWMIQY

SEQ ID NO: 46331 - protein, 9 aa, Artificial Sequence
  Description of Artificial Sequence: Synthetic peptide
GYESKNTWY

SEQ ID NO: 46332 - protein, 9 aa, Artificial Sequence
  Description of Artificial Sequence: Synthetic peptide
GYEWVQEIE

SEQ ID NO: 46333 - protein, 9 aa, Artificial Sequence
  Description of Artificial Sequence: Synthetic peptide
GYFPNHWCK

SEQ ID NO: 46334 - protein, 9 aa, Artificial Sequence
  Description of Artificial Sequence: Synthetic peptide
GYHCTGAHS

SEQ ID NO: 46335 - protein, 9 aa, Artificial Sequence
  Description of Artificial Sequence: Synthetic peptide
GYICEGTCH

SEQ ID NO: 46336 - protein, 9 aa, Artificial Sequence
  Description of Artificial Sequence: Synthetic peptide
GYNERFEHK

SEQ ID NO: 46337 - protein, 9 aa, Artificial Sequence
  Description of Artificial Sequence: Synthetic peptide
GYNPMMSAA

SEQ ID NO: 46338 - protein, 9 aa, Artificial Sequence
  Description of Artificial Sequence: Synthetic peptide
GYSQKPRTP

SEQ ID NO: 46339 - protein, 9 aa, Artificial Sequence
  Description of Artificial Sequence: Synthetic peptide
GYTYNQQVC

SEQ ID NO: 46340 - protein, 9 aa, Artificial Sequence
  Description of Artificial Sequence: Synthetic peptide
HADAENQVM

SEQ ID NO: 46341 - protein, 9 aa, Artificial Sequence
  Description of Artificial Sequence: Synthetic peptide
HAIPHTMWH

SEQ ID NO: 46342 - protein, 9 aa, Artificial Sequence
  Description of Artificial Sequence: Synthetic peptide
HAIQEGTVP

SEQ ID NO: 46343 - protein, 9 aa, Artificial Sequence
  Description of Artificial Sequence: Synthetic peptide
HAIYWIPQV

SEQ ID NO: 46344 - protein, 9 aa, Artificial Sequence
  Description of Artificial Sequence: Synthetic peptide
HAMATECGP

SEQ ID NO: 46345 - protein, 9 aa, Artificial Sequence
  Description of Artificial Sequence: Synthetic peptide
HAMLSHGCC

SEQ ID NO: 46346 - protein, 9 aa, Artificial Sequence
  Description of Artificial Sequence: Synthetic peptide
HANESISMT

SEQ ID NO: 46347 - protein, 9 aa, Artificial Sequence
  Description of Artificial Sequence: Synthetic peptide
HASYQSSFG

SEQ ID NO: 46348 - protein, 9 aa, Artificial Sequence
  Description of Artificial Sequence: Synthetic peptide
HATSQELCQ

SEQ ID NO: 46349 - protein, 9 aa, Artificial Sequence
  Description of Artificial Sequence: Synthetic peptide
HATTFEWDS

SEQ ID NO: 46350 - protein, 9 aa, Artificial Sequence
  Description of Artificial Sequence: Synthetic peptide
HAYALAVEH

SEQ ID NO: 46351 - protein, 9 aa, Artificial Sequence
  Description of Artificial Sequence: Synthetic peptide
HCCSANNSP

SEQ ID NO: 46352 - protein, 9 aa, Artificial Sequence
  Description of Artificial Sequence: Synthetic peptide
HCELISRIA

SEQ ID NO: 46353 - protein, 9 aa, Artificial Sequence
  Description of Artificial Sequence: Synthetic peptide
HCELLPVNE

SEQ ID NO: 46354 - protein, 9 aa, Artificial Sequence
  Description of Artificial Sequence: Synthetic peptide
HCFMAHCSY

SEQ ID NO: 46355 - protein, 9 aa, Artificial Sequence
  Description of Artificial Sequence: Synthetic peptide
HCMNWMING

SEQ ID NO: 46356 - protein, 9 aa, Artificial Sequence
  Description of Artificial Sequence: Synthetic peptide
HCQILPGWA

SEQ ID NO: 46357 - protein, 9 aa, Artificial Sequence
  Description of Artificial Sequence: Synthetic peptide
HCVNEHAWE

SEQ ID NO: 46358 - protein, 9 aa, Artificial Sequence
  Description of Artificial Sequence: Synthetic peptide
HDGFPWADE

SEQ ID NO: 46359 - protein, 9 aa, Artificial Sequence
  Description of Artificial Sequence: Synthetic peptide
HERNWPFAC

SEQ ID NO: 46360 - protein, 9 aa, Artificial Sequence
  Description of Artificial Sequence: Synthetic peptide
HESCLKLAG

SEQ ID NO: 46361 - protein, 9 aa, Artificial Sequence
  Description of Artificial Sequence: Synthetic peptide
HEWAGELQT

SEQ ID NO: 46362 - protein, 9 aa, Artificial Sequence
  Description of Artificial Sequence: Synthetic peptide
HEYGFGEAR

SEQ ID NO: 46363 - protein, 9 aa, Artificial Sequence
  Description of Artificial Sequence: Synthetic peptide
HFANICVRG

SEQ ID NO: 46364 - protein, 9 aa, Artificial Sequence
  Description of Artificial Sequence: Synthetic peptide
HFEHLWCQS

SEQ ID NO: 46365 - protein, 9 aa, Artificial Sequence
  Description of Artificial Sequence: Synthetic peptide
HFGHYLGMF

SEQ ID NO: 46366 - protein, 9 aa, Artificial Sequence
  Description of Artificial Sequence: Synthetic peptide
HFISHDYHN

SEQ ID NO: 46367 - protein, 9 aa, Artificial Sequence
  Description of Artificial Sequence: Synthetic peptide
HFMPNNFLA

SEQ ID NO: 46368 - protein, 9 aa, Artificial Sequence
  Description of Artificial Sequence: Synthetic peptide
HFVNSYCWW

SEQ ID NO: 46369 - protein, 9 aa, Artificial Sequence
  Description of Artificial Sequence: Synthetic peptide
HGAQFARCS

SEQ ID NO: 46370 - protein, 9 aa, Artificial Sequence
  Description of Artificial Sequence: Synthetic peptide
HGNEVDHSM

SEQ ID NO: 46371 - protein, 9 aa, Artificial Sequence
  Description of Artificial Sequence: Synthetic peptide
HHAVMNKMD

SEQ ID NO: 46372 - protein, 9 aa, Artificial Sequence
  Description of Artificial Sequence: Synthetic peptide
HHEVTTKFQ

SEQ ID NO: 46373 - protein, 9 aa, Artificial Sequence
  Description of Artificial Sequence: Synthetic peptide
HHFHSGCCW

SEQ ID NO: 46374 - protein, 9 aa, Artificial Sequence
  Description of Artificial Sequence: Synthetic peptide
HHPPELDRM

SEQ ID NO: 46375 - protein, 9 aa, Artificial Sequence
  Description of Artificial Sequence: Synthetic peptide
HHTDRNGGD

SEQ ID NO: 46376 - protein, 9 aa, Artificial Sequence
  Description of Artificial Sequence: Synthetic peptide
HHVLKGDMA

SEQ ID NO: 46377 - protein, 9 aa, Artificial Sequence
  Description of Artificial Sequence: Synthetic peptide
HIDGATVSG

SEQ ID NO: 46378 - protein, 9 aa, Artificial Sequence
  Description of Artificial Sequence: Synthetic peptide
HIKWDCWCP

SEQ ID NO: 46379 - protein, 9 aa, Artificial Sequence
  Description of Artificial Sequence: Synthetic peptide
HINAFDNIR

SEQ ID NO: 46380 - protein, 9 aa, Artificial Sequence
  Description of Artificial Sequence: Synthetic peptide
HISWWPACG

SEQ ID NO: 46381 - protein, 9 aa, Artificial Sequence
  Description of Artificial Sequence: Synthetic peptide
HITTLYMEA

SEQ ID NO: 46382 - protein, 9 aa, Artificial Sequence
  Description of Artificial Sequence: Synthetic peptide
HKLVAHERH

SEQ ID NO: 46383 - protein, 9 aa, Artificial Sequence
  Description of Artificial Sequence: Synthetic peptide
HKPMCDRVF

SEQ ID NO: 46384 - protein, 9 aa, Artificial Sequence
  Description of Artificial Sequence: Synthetic peptide
HLMGLCAMS

SEQ ID NO: 46385 - protein, 9 aa, Artificial Sequence
  Description of Artificial Sequence: Synthetic peptide
HLQSISHCH

SEQ ID NO: 46386 - protein, 9 aa, Artificial Sequence
  Description of Artificial Sequence: Synthetic peptide
HLVGMSLTQ

SEQ ID NO: 46387 - protein, 9 aa, Artificial Sequence
  Description of Artificial Sequence: Synthetic peptide
HMEMPYKLG

SEQ ID NO: 46388 - protein, 9 aa, Artificial Sequence
  Description of Artificial Sequence: Synthetic peptide
HMKCDVWQP

SEQ ID NO: 46389 - protein, 9 aa, Artificial Sequence
  Description of Artificial Sequence: Synthetic peptide
HMLKKEDMN

SEQ ID NO: 46390 - protein, 9 aa, Artificial Sequence
  Description of Artificial Sequence: Synthetic peptide
HMTTVNLQY

SEQ ID NO: 46391 - protein, 9 aa, Artificial Sequence
  Description of Artificial Sequence: Synthetic peptide
HNGKSVLEW

SEQ ID NO: 46392 - protein, 9 aa, Artificial Sequence
  Description of Artificial Sequence: Synthetic peptide
HNKMTYNYE

SEQ ID NO: 46393 - protein, 9 aa, Artificial Sequence
  Description of Artificial Sequence: Synthetic peptide
HNNMFFWDR

SEQ ID NO: 46394 - protein, 9 aa, Artificial Sequence
  Description of Artificial Sequence: Synthetic peptide
HNRAHENDK

SEQ ID NO: 46395 - protein, 9 aa, Artificial Sequence
  Description of Artificial Sequence: Synthetic peptide
HNSVVNDHE

SEQ ID NO: 46396 - protein, 9 aa, Artificial Sequence
  Description of Artificial Sequence: Synthetic peptide
HNTQNGFAD

SEQ ID NO: 46397 - protein, 9 aa, Artificial Sequence
  Description of Artificial Sequence: Synthetic peptide
HNWYKRIVQ

SEQ ID NO: 46398 - protein, 9 aa, Artificial Sequence
  Description of Artificial Sequence: Synthetic peptide
HPGIDLVCG

SEQ ID NO: 46399 - protein, 9 aa, Artificial Sequence
  Description of Artificial Sequence: Synthetic peptide
HQCFWIYGS

SEQ ID NO: 46400 - protein, 9 aa, Artificial Sequence
  Description of Artificial Sequence: Synthetic peptide
HQFQFYQWM

SEQ ID NO: 46401 - protein, 9 aa, Artificial Sequence
  Description of Artificial Sequence: Synthetic peptide
HQPPIMNQG

SEQ ID NO: 46402 - protein, 9 aa, Artificial Sequence
  Description of Artificial Sequence: Synthetic peptide
HRCTMQPDI

SEQ ID NO: 46403 - protein, 9 aa, Artificial Sequence
  Description of Artificial Sequence: Synthetic peptide
HRCTPYNRD

SEQ ID NO: 46404 - protein, 9 aa, Artificial Sequence
  Description of Artificial Sequence: Synthetic peptide
HRDHDITDF

SEQ ID NO: 46405 - protein, 9 aa, Artificial Sequence
  Description of Artificial Sequence: Synthetic peptide
HRFSPPMET

SEQ ID NO: 46406 - protein, 9 aa, Artificial Sequence
  Description of Artificial Sequence: Synthetic peptide
HRHFEMSVI

SEQ ID NO: 46407 - protein, 9 aa, Artificial Sequence
  Description of Artificial Sequence: Synthetic peptide
HRMVIRKSQ

SEQ ID NO: 46408 - protein, 9 aa, Artificial Sequence
  Description of Artificial Sequence: Synthetic peptide
HRVQCDEAP

SEQ ID NO: 46409 - protein, 9 aa, Artificial Sequence
  Description of Artificial Sequence: Synthetic peptide
HSCTSGNPG

SEQ ID NO: 46410 - protein, 9 aa, Artificial Sequence
  Description of Artificial Sequence: Synthetic peptide
HSESIDVWS

SEQ ID NO: 46411 - protein, 9 aa, Artificial Sequence
  Description of Artificial Sequence: Synthetic peptide
HSETQRHQM

SEQ ID NO: 46412 - protein, 9 aa, Artificial Sequence
  Description of Artificial Sequence: Synthetic peptide
HSGPWSNCE

SEQ ID NO: 46413 - protein, 9 aa, Artificial Sequence
  Description of Artificial Sequence: Synthetic peptide
HSMQTKFDW

SEQ ID NO: 46414 - protein, 9 aa, Artificial Sequence
  Description of Artificial Sequence: Synthetic peptide
HSSALFDME

SEQ ID NO: 46415 - protein, 9 aa, Artificial Sequence
  Description of Artificial Sequence: Synthetic peptide
HSTQAGGMY

SEQ ID NO: 46416 - protein, 9 aa, Artificial Sequence
  Description of Artificial Sequence: Synthetic peptide
HSTTACVHN

SEQ ID NO: 46417 - protein, 9 aa, Artificial Sequence
  Description of Artificial Sequence: Synthetic peptide
HSVMWGKEN

SEQ ID NO: 46418 - protein, 9 aa, Artificial Sequence
  Description of Artificial Sequence: Synthetic peptide
HTDKWWRDI

SEQ ID NO: 46419 - protein, 9 aa, Artificial Sequence
  Description of Artificial Sequence: Synthetic peptide
HTEKGGEQA

SEQ ID NO: 46420 - protein, 9 aa, Artificial Sequence
  Description of Artificial Sequence: Synthetic peptide
HTIHGAGLI

SEQ ID NO: 46421 - protein, 9 aa, Artificial Sequence
  Description of Artificial Sequence: Synthetic peptide
HTIPVPMAA

SEQ ID NO: 46422 - protein, 9 aa, Artificial Sequence
  Description of Artificial Sequence: Synthetic peptide
HTNTCLFEE

SEQ ID NO: 46423 - protein, 9 aa, Artificial Sequence
  Description of Artificial Sequence: Synthetic peptide
HTQIIGGSD

SEQ ID NO: 46424 - protein, 9 aa, Artificial Sequence
  Description of Artificial Sequence: Synthetic peptide
HTQWFNMGE

SEQ ID NO: 46425 - protein, 9 aa, Artificial Sequence
  Description of Artificial Sequence: Synthetic peptide
HVDQYYRSA

SEQ ID NO: 46426 - protein, 9 aa, Artificial Sequence
  Description of Artificial Sequence: Synthetic peptide
HVDTEKGRE

SEQ ID NO: 46427 - protein, 9 aa, Artificial Sequence
  Description of Artificial Sequence: Synthetic peptide
HVELSQLHS

SEQ ID NO: 46428 - protein, 9 aa, Artificial Sequence
  Description of Artificial Sequence: Synthetic peptide
HVEWVNAEK

SEQ ID NO: 46429 - protein, 9 aa, Artificial Sequence
  Description of Artificial Sequence: Synthetic peptide
HVLPVCYRM

SEQ ID NO: 46430 - protein, 9 aa, Artificial Sequence
  Description of Artificial Sequence: Synthetic peptide
HVMFPWGMW

SEQ ID NO: 46431 - protein, 9 aa, Artificial Sequence
  Description of Artificial Sequence: Synthetic peptide
HVMYQHWMM

SEQ ID NO: 46432 - protein, 9 aa, Artificial Sequence
  Description of Artificial Sequence: Synthetic peptide
HVNIEHQGT

SEQ ID NO: 46433 - protein, 9 aa, Artificial Sequence
  Description of Artificial Sequence: Synthetic peptide
HVSDCCKSQ

SEQ ID NO: 46434 - protein, 9 aa, Artificial Sequence
  Description of Artificial Sequence: Synthetic peptide
HVVKYPLSG

SEQ ID NO: 46435 - protein, 9 aa, Artificial Sequence
  Description of Artificial Sequence: Synthetic peptide
HVYRGNGME

SEQ ID NO: 46436 - protein, 9 aa, Artificial Sequence
  Description of Artificial Sequence: Synthetic peptide
HWDECNYVG

SEQ ID NO: 46437 - protein, 9 aa, Artificial Sequence
  Description of Artificial Sequence: Synthetic peptide
HWDQFNGQF

SEQ ID NO: 46438 - protein, 9 aa, Artificial Sequence
  Description of Artificial Sequence: Synthetic peptide
IDGDDEPRA

SEQ ID NO: 46439 - protein, 9 aa, Artificial Sequence
  Description of Artificial Sequence: Synthetic peptide
PRSDDDQRF

SEQ ID NO: 46440 - protein, 9 aa, Artificial Sequence
  Description of Artificial Sequence: Synthetic peptide
WDCEDERRH

SEQ ID NO: 46441 - protein, 9 aa, Artificial Sequence
  Description of Artificial Sequence: Synthetic peptide
DDPDDLECC

SEQ ID NO: 46442 - protein, 9 aa, Artificial Sequence
  Description of Artificial Sequence: Synthetic peptide
PESDPERTN

SEQ ID NO: 46443 - protein, 9 aa, Artificial Sequence
  Description of Artificial Sequence: Synthetic peptide
REWWWCLRI

SEQ ID NO: 46444 - protein, 9 aa, Artificial Sequence
  Description of Artificial Sequence: Synthetic peptide
DDHEEVFKA

SEQ ID NO: 46445 - protein, 9 aa, Artificial Sequence
  Description of Artificial Sequence: Synthetic peptide
DEDECEGRM

SEQ ID NO: 46446 - protein, 9 aa, Artificial Sequence
  Description of Artificial Sequence: Synthetic peptide
AEIEKDPRW

SEQ ID NO: 46447 - protein, 9 aa, Artificial Sequence
  Description of Artificial Sequence: Synthetic peptide
PEPLPEPSK

SEQ ID NO: 46448 - protein, 9 aa, Artificial Sequence
  Description of Artificial Sequence: Synthetic peptide
YECVERDRF

SEQ ID NO: 46449 - protein, 9 aa, Artificial Sequence
  Description of Artificial Sequence: Synthetic peptide
PHPQATGPS

SEQ ID NO: 46450 - protein, 9 aa, Artificial Sequence
  Description of Artificial Sequence: Synthetic peptide
QEHHPRDRW

SEQ ID NO: 46451 - protein, 9 aa, Artificial Sequence
  Description of Artificial Sequence: Synthetic peptide
CDTEAEFRR

SEQ ID NO: 46452 - protein, 9 aa, Artificial Sequence
  Description of Artificial Sequence: Synthetic peptide
MEPGEKSRP

SEQ ID NO: 46453 - protein, 9 aa, Artificial Sequence
  Description of Artificial Sequence: Synthetic peptide
LEMGGKTRT

SEQ ID NO: 46454 - protein, 9 aa, Artificial Sequence
  Description of Artificial Sequence: Synthetic peptide
CHPHDEHKT

SEQ ID NO: 46455 - protein, 9 aa, Artificial Sequence
  Description of Artificial Sequence: Synthetic peptide
MDLFPPHRH

SEQ ID NO: 46456 - protein, 9 aa, Artificial Sequence
  Description of Artificial Sequence: Synthetic peptide
YEDNDVMQI

SEQ ID NO: 46457 - protein, 9 aa, Artificial Sequence
  Description of Artificial Sequence: Synthetic peptide
PDMKSVVKA

SEQ ID NO: 46458 - protein, 9 aa, Artificial Sequence
  Description of Artificial Sequence: Synthetic peptide
KWPIEWGHY

SEQ ID NO: 46459 - protein, 9 aa, Artificial Sequence
  Description of Artificial Sequence: Synthetic peptide
VDRLPPNKS

SEQ ID NO: 46460 - protein, 9 aa, Artificial Sequence
  Description of Artificial Sequence: Synthetic peptide
MDWDDAIRG

SEQ ID NO: 46461 - protein, 9 aa, Artificial Sequence
  Description of Artificial Sequence: Synthetic peptide
WDRPPVMRP

SEQ ID NO: 46462 - protein, 9 aa, Artificial Sequence
  Description of Artificial Sequence: Synthetic peptide
YDWGRVTPN

SEQ ID NO: 46463 - protein, 9 aa, Artificial Sequence
  Description of Artificial Sequence: Synthetic peptide
REPWQTTEH

SEQ ID NO: 46464 - protein, 9 aa, Artificial Sequence
  Description of Artificial Sequence: Synthetic peptide
PWKHEPSEF

SEQ ID NO: 46465 - protein, 9 aa, Artificial Sequence
  Description of Artificial Sequence: Synthetic peptide
FDSHPKIER

SEQ ID NO: 46466 - protein, 9 aa, Artificial Sequence
  Description of Artificial Sequence: Synthetic peptide
LRDRDGNRM

SEQ ID NO: 46467 - protein, 9 aa, Artificial Sequence
  Description of Artificial Sequence: Synthetic peptide
RRGMEPTKH

SEQ ID NO: 46468 - protein, 9 aa, Artificial Sequence
  Description of Artificial Sequence: Synthetic peptide
GDERPGQRN

SEQ ID NO: 46469 - protein, 9 aa, Artificial Sequence
  Description of Artificial Sequence: Synthetic peptide
PLDRDQATQ

SEQ ID NO: 46470 - protein, 9 aa, Artificial Sequence
  Description of Artificial Sequence: Synthetic peptide
PKNCRWYRT

SEQ ID NO: 46471 - protein, 9 aa, Artificial Sequence
  Description of Artificial Sequence: Synthetic peptide
PECGDRGDR

SEQ ID NO: 46472 - protein, 9 aa, Artificial Sequence
  Description of Artificial Sequence: Synthetic peptide
WDHEPETKH

SEQ ID NO: 46473 - protein, 9 aa, Artificial Sequence
  Description of Artificial Sequence: Synthetic peptide
EGPDPCNSA

SEQ ID NO: 46474 - protein, 9 aa, Artificial Sequence
  Description of Artificial Sequence: Synthetic peptide
PECFPKGRN

SEQ ID NO: 46475 - protein, 9 aa, Artificial Sequence
  Description of Artificial Sequence: Synthetic peptide
CDHDTKHPT

SEQ ID NO: 46476 - protein, 9 aa, Artificial Sequence
  Description of Artificial Sequence: Synthetic peptide
PADFRDTRV

SEQ ID NO: 46477 - protein, 9 aa, Artificial Sequence
  Description of Artificial Sequence: Synthetic peptide
CEYDDESQF

SEQ ID NO: 46478 - protein, 9 aa, Artificial Sequence
  Description of Artificial Sequence: Synthetic peptide
DDEDVSEEI

SEQ ID NO: 46479 - protein, 9 aa, Artificial Sequence
  Description of Artificial Sequence: Synthetic peptide
HDKPGKPPY

SEQ ID NO: 46480 - protein, 9 aa, Artificial Sequence
  Description of Artificial Sequence: Synthetic peptide
KNPPWICVW

SEQ ID NO: 46481 - protein, 9 aa, Artificial Sequence
  Description of Artificial Sequence: Synthetic peptide
PIEKDDNVD

SEQ ID NO: 46482 - protein, 9 aa, Artificial Sequence
  Description of Artificial Sequence: Synthetic peptide
PKMDKVEPC

SEQ ID NO: 46483 - protein, 9 aa, Artificial Sequence
  Description of Artificial Sequence: Synthetic peptide
PDPCTEGTC

SEQ ID NO: 46484 - protein, 9 aa, Artificial Sequence
  Description of Artificial Sequence: Synthetic peptide
ADNCPKNDN

SEQ ID NO: 46485 - protein, 9 aa, Artificial Sequence
  Description of Artificial Sequence: Synthetic peptide
PDHITKCDE

SEQ ID NO: 46486 - protein, 9 aa, Artificial Sequence
  Description of Artificial Sequence: Synthetic peptide
DDHDDKLVA

SEQ ID NO: 46487 - protein, 9 aa, Artificial Sequence
  Description of Artificial Sequence: Synthetic peptide
WEDEPPWKI

SEQ ID NO: 46488 - protein, 9 aa, Artificial Sequence
  Description of Artificial Sequence: Synthetic peptide
PQPDENYPW

SEQ ID NO: 46489 - protein, 9 aa, Artificial Sequence
  Description of Artificial Sequence: Synthetic peptide
FDREKRDGN

SEQ ID NO: 46490 - protein, 9 aa, Artificial Sequence
  Description of Artificial Sequence: Synthetic peptide
GNPHEGQKF

SEQ ID NO: 46491 - protein, 9 aa, Artificial Sequence
  Description of Artificial Sequence: Synthetic peptide
PEGSMDRRF

SEQ ID NO: 46492 - protein, 9 aa, Artificial Sequence
  Description of Artificial Sequence: Synthetic peptide
GDWSERSIT

SEQ ID NO: 46493 - protein, 9 aa, Artificial Sequence
  Description of Artificial Sequence: Synthetic peptide
PERWERPVW

SEQ ID NO: 46494 - protein, 9 aa, Artificial Sequence
  Description of Artificial Sequence: Synthetic peptide
NDLCQDQRV

SEQ ID NO: 46495 - protein, 9 aa, Artificial Sequence
  Description of Artificial Sequence: Synthetic peptide
TRPDESPRQ

SEQ ID NO: 46496 - protein, 9 aa, Artificial Sequence
  Description of Artificial Sequence: Synthetic peptide
WECADRRPT

SEQ ID NO: 46497 - protein, 9 aa, Artificial Sequence
  Description of Artificial Sequence: Synthetic peptide
YESCNLTRD

SEQ ID NO: 46498 - protein, 9 aa, Artificial Sequence
  Description of Artificial Sequence: Synthetic peptide
PPPVHNDRS

SEQ ID NO: 46499 - protein, 9 aa, Artificial Sequence
  Description of Artificial Sequence: Synthetic peptide
VHPEACMRN

SEQ ID NO: 46500 - protein, 9 aa, Artificial Sequence
  Description of Artificial Sequence: Synthetic peptide
PDQVDRNTP

SEQ ID NO: 46501 - protein, 9 aa, Artificial Sequence
  Description of Artificial Sequence: Synthetic peptide
REPNSGLVY

SEQ ID NO: 46502 - protein, 9 aa, Artificial Sequence
  Description of Artificial Sequence: Synthetic peptide
EEPEFTGRG

SEQ ID NO: 46503 - protein, 9 aa, Artificial Sequence
  Description of Artificial Sequence: Synthetic peptide
TDHNGEIRP

SEQ ID NO: 46504 - protein, 9 aa, Artificial Sequence
  Description of Artificial Sequence: Synthetic peptide
CDRDPSWRD

SEQ ID NO: 46505 - protein, 9 aa, Artificial Sequence
  Description of Artificial Sequence: Synthetic peptide
QDRNRVHRQ

SEQ ID NO: 46506 - protein, 9 aa, Artificial Sequence
  Description of Artificial Sequence: Synthetic peptide
IDPYDCDPT

SEQ ID NO: 46507 - protein, 9 aa, Artificial Sequence
  Description of Artificial Sequence: Synthetic peptide
PDQDDMMHG

SEQ ID NO: 46508 - protein, 9 aa, Artificial Sequence
  Description of Artificial Sequence: Synthetic peptide
YEYRPELRA

SEQ ID NO: 46509 - protein, 9 aa, Artificial Sequence
  Description of Artificial Sequence: Synthetic peptide
CVPEPWDYR

SEQ ID NO: 46510 - protein, 9 aa, Artificial Sequence
  Description of Artificial Sequence: Synthetic peptide
MDPKHHCES

SEQ ID NO: 46511 - protein, 9 aa, Artificial Sequence
  Description of Artificial Sequence: Synthetic peptide
QDQCDDKIE

SEQ ID NO: 46512 - protein, 9 aa, Artificial Sequence
  Description of Artificial Sequence: Synthetic peptide
MHYCDRERK

SEQ ID NO: 46513 - protein, 9 aa, Artificial Sequence
  Description of Artificial Sequence: Synthetic peptide
PPDRCTAEK

SEQ ID NO: 46514 - protein, 9 aa, Artificial Sequence
  Description of Artificial Sequence: Synthetic peptide
RNPSQDQKG

SEQ ID NO: 46515 - protein, 9 aa, Artificial Sequence
  Description of Artificial Sequence: Synthetic peptide
CDTHDVSKD

SEQ ID NO: 46516 - protein, 9 aa, Artificial Sequence
  Description of Artificial Sequence: Synthetic peptide
DVADVPDTT

SEQ ID NO: 46517 - protein, 9 aa, Artificial Sequence
  Description of Artificial Sequence: Synthetic peptide
DEKPMDGRG

SEQ ID NO: 46518 - protein, 9 aa, Artificial Sequence
  Description of Artificial Sequence: Synthetic peptide
PDTSPYCKS

SEQ ID NO: 46519 - protein, 9 aa, Artificial Sequence
  Description of Artificial Sequence: Synthetic peptide
QLPDKWPKS

SEQ ID NO: 46520 - protein, 9 aa, Artificial Sequence
  Description of Artificial Sequence: Synthetic peptide
YRCCDDSKT

SEQ ID NO: 46521 - protein, 9 aa, Artificial Sequence
  Description of Artificial Sequence: Synthetic peptide
PAECISDSQ

SEQ ID NO: 46522 - protein, 9 aa, Artificial Sequence
  Description of Artificial Sequence: Synthetic peptide
PDPLYWIMN

SEQ ID NO: 46523 - protein, 9 aa, Artificial Sequence
  Description of Artificial Sequence: Synthetic peptide
LEEGDHMHM

SEQ ID NO: 46524 - protein, 9 aa, Artificial Sequence
  Description of Artificial Sequence: Synthetic peptide
GDHEPKHEH

SEQ ID NO: 46525 - protein, 9 aa, Artificial Sequence
  Description of Artificial Sequence: Synthetic peptide
WEVEQRPRH

SEQ ID NO: 46526 - protein, 9 aa, Artificial Sequence
  Description of Artificial Sequence: Synthetic peptide
CECWPEYKR

SEQ ID NO: 46527 - protein, 9 aa, Artificial Sequence
  Description of Artificial Sequence: Synthetic peptide
PFPLNPERH

SEQ ID NO: 46528 - protein, 9 aa, Artificial Sequence
  Description of Artificial Sequence: Synthetic peptide
DVISRNGRC

SEQ ID NO: 46529 - protein, 9 aa, Artificial Sequence
  Description of Artificial Sequence: Synthetic peptide
PNEDKIKPD

SEQ ID NO: 46530 - protein, 9 aa, Artificial Sequence
  Description of Artificial Sequence: Synthetic peptide
YPCDDTKPE

SEQ ID NO: 46531 - protein, 9 aa, Artificial Sequence
  Description of Artificial Sequence: Synthetic peptide
DTDEENSPH

SEQ ID NO: 46532 - protein, 9 aa, Artificial Sequence
  Description of Artificial Sequence: Synthetic peptide
IDPGMMFRG

SEQ ID NO: 46533 - protein, 9 aa, Artificial Sequence
  Description of Artificial Sequence: Synthetic peptide
PEQRDRLGF

SEQ ID NO: 46534 - protein, 9 aa, Artificial Sequence
  Description of Artificial Sequence: Synthetic peptide
DEPSDDDEE

SEQ ID NO: 46535 - protein, 9 aa, Artificial Sequence
  Description of Artificial Sequence: Synthetic peptide
HHPPKQPPN

SEQ ID NO: 46536 - protein, 9 aa, Artificial Sequence
  Description of Artificial Sequence: Synthetic peptide
CRWEDYDSR

SEQ ID NO: 46537 - protein, 9 aa, Artificial Sequence
  Description of Artificial Sequence: Synthetic peptide
CPPQADRIQ

SEQ ID NO: 46538 - protein, 9 aa, Artificial Sequence
  Description of Artificial Sequence: Synthetic peptide
PQPQFDMMQ

SEQ ID NO: 46539 - protein, 9 aa, Artificial Sequence
  Description of Artificial Sequence: Synthetic peptide
EFPDGGHKM

SEQ ID NO: 46540 - protein, 9 aa, Artificial Sequence
  Description of Artificial Sequence: Synthetic peptide
CNCPDQHPD

SEQ ID NO: 46541 - protein, 9 aa, Artificial Sequence
  Description of Artificial Sequence: Synthetic peptide
WPKCDECRM

SEQ ID NO: 46542 - protein, 9 aa, Artificial Sequence
  Description of Artificial Sequence: Synthetic peptide
ADNEDARPK

SEQ ID NO: 46543 - protein, 9 aa, Artificial Sequence
  Description of Artificial Sequence: Synthetic peptide
PICRPDTDV

SEQ ID NO: 46544 - protein, 9 aa, Artificial Sequence
  Description of Artificial Sequence: Synthetic peptide
APCHDKDRE

SEQ ID NO: 46545 - protein, 9 aa, Artificial Sequence
  Description of Artificial Sequence: Synthetic peptide
LDPPDSACG

SEQ ID NO: 46546 - protein, 9 aa, Artificial Sequence
  Description of Artificial Sequence: Synthetic peptide
VETEEKMIL

SEQ ID NO: 46547 - protein, 9 aa, Artificial Sequence
  Description of Artificial Sequence: Synthetic peptide
MEDTDERSN

SEQ ID NO: 46548 - protein, 9 aa, Artificial Sequence
  Description of Artificial Sequence: Synthetic peptide
CDRDKRHDH

SEQ ID NO: 46549 - protein, 9 aa, Artificial Sequence
  Description of Artificial Sequence: Synthetic peptide
GEEADEYHM

SEQ ID NO: 46550 - protein, 9 aa, Artificial Sequence
  Description of Artificial Sequence: Synthetic peptide
RDIWECIRR

SEQ ID NO: 46551 - protein, 9 aa, Artificial Sequence
  Description of Artificial Sequence: Synthetic peptide
AECQEDRRG

SEQ ID NO: 46552 - protein, 9 aa, Artificial Sequence
  Description of Artificial Sequence: Synthetic peptide
TEPDTVDES

SEQ ID NO: 46553 - protein, 9 aa, Artificial Sequence
  Description of Artificial Sequence: Synthetic peptide
PDPGIRWPM

SEQ ID NO: 46554 - protein, 9 aa, Artificial Sequence
  Description of Artificial Sequence: Synthetic peptide
PRDVDDSAY

SEQ ID NO: 46555 - protein, 9 aa, Artificial Sequence
  Description of Artificial Sequence: Synthetic peptide
VEEDQSCKT

SEQ ID NO: 46556 - protein, 9 aa, Artificial Sequence
  Description of Artificial Sequence: Synthetic peptide
RQYFEDNAG

SEQ ID NO: 46557 - protein, 9 aa, Artificial Sequence
  Description of Artificial Sequence: Synthetic peptide
YDQWERDIH

SEQ ID NO: 46558 - protein, 9 aa, Artificial Sequence
  Description of Artificial Sequence: Synthetic peptide
RKPEWSCMV

SEQ ID NO: 46559 - protein, 9 aa, Artificial Sequence
  Description of Artificial Sequence: Synthetic peptide
LNPQSPEPK

SEQ ID NO: 46560 - protein, 9 aa, Artificial Sequence
  Description of Artificial Sequence: Synthetic peptide
PPCKMKIDT

SEQ ID NO: 46561 - protein, 9 aa, Artificial Sequence
  Description of Artificial Sequence: Synthetic peptide
PNDWITDPH

SEQ ID NO: 46562 - protein, 9 aa, Artificial Sequence
  Description of Artificial Sequence: Synthetic peptide
VERMENPKH

SEQ ID NO: 46563 - protein, 9 aa, Artificial Sequence
  Description of Artificial Sequence: Synthetic peptide
DAPEPHAQK

SEQ ID NO: 46564 - protein, 9 aa, Artificial Sequence
  Description of Artificial Sequence: Synthetic peptide
PQEPEEGKT

SEQ ID NO: 46565 - protein, 9 aa, Artificial Sequence
  Description of Artificial Sequence: Synthetic peptide
HDMDDVLNH

SEQ ID NO: 46566 - protein, 9 aa, Artificial Sequence
  Description of Artificial Sequence: Synthetic peptide
VDCTPDRRN

SEQ ID NO: 46567 - protein, 9 aa, Artificial Sequence
  Description of Artificial Sequence: Synthetic peptide
PHQARKNKP

SEQ ID NO: 46568 - protein, 9 aa, Artificial Sequence
  Description of Artificial Sequence: Synthetic peptide
CEDEGKTWL

SEQ ID NO: 46569 - protein, 9 aa, Artificial Sequence
  Description of Artificial Sequence: Synthetic peptide
PFPQMNSNA

SEQ ID NO: 46570 - protein, 9 aa, Artificial Sequence
  Description of Artificial Sequence: Synthetic peptide
ADLRPSVDY

SEQ ID NO: 46571 - protein, 9 aa, Artificial Sequence
  Description of Artificial Sequence: Synthetic peptide
GEPWDTRIV

SEQ ID NO: 46572 - protein, 9 aa, Artificial Sequence
  Description of Artificial Sequence: Synthetic peptide
YKPKFDAMG

SEQ ID NO: 46573 - protein, 9 aa, Artificial Sequence
  Description of Artificial Sequence: Synthetic peptide
PIPQQGGTA

SEQ ID NO: 46574 - protein, 9 aa, Artificial Sequence
  Description of Artificial Sequence: Synthetic peptide
MDGRDKVDP

SEQ ID NO: 46575 - protein, 9 aa, Artificial Sequence
  Description of Artificial Sequence: Synthetic peptide
CEDQRQPME

SEQ ID NO: 46576 - protein, 9 aa, Artificial Sequence
  Description of Artificial Sequence: Synthetic peptide
PDFHHKRDF

SEQ ID NO: 46577 - protein, 9 aa, Artificial Sequence
  Description of Artificial Sequence: Synthetic peptide
NEGCRDEKS

SEQ ID NO: 46578 - protein, 9 aa, Artificial Sequence
  Description of Artificial Sequence: Synthetic peptide
LQPNAVGKT

SEQ ID NO: 46579 - protein, 9 aa, Artificial Sequence
  Description of Artificial Sequence: Synthetic peptide
PKLCSHQTE

SEQ ID NO: 46580 - protein, 9 aa, Artificial Sequence
  Description of Artificial Sequence: Synthetic peptide
QVPDEGYSW

SEQ ID NO: 46581 - protein, 9 aa, Artificial Sequence
  Description of Artificial Sequence: Synthetic peptide
NEPDKGYTM

SEQ ID NO: 46582 - protein, 9 aa, Artificial Sequence
  Description of Artificial Sequence: Synthetic peptide
DLDDVCNKC

SEQ ID NO: 46583 - protein, 9 aa, Artificial Sequence
  Description of Artificial Sequence: Synthetic peptide
QDTDEGDQC

SEQ ID NO: 46584 - protein, 9 aa, Artificial Sequence
  Description of Artificial Sequence: Synthetic peptide
FDNPDEYVT

SEQ ID NO: 46585 - protein, 9 aa, Artificial Sequence
  Description of Artificial Sequence: Synthetic peptide
YPDCEGGKM

SEQ ID NO: 46586 - protein, 9 aa, Artificial Sequence
  Description of Artificial Sequence: Synthetic peptide
DVNKPDEKW

SEQ ID NO: 46587 - protein, 9 aa, Artificial Sequence
  Description of Artificial Sequence: Synthetic peptide
EVNDDHAKP

SEQ ID NO: 46588 - protein, 9 aa, Artificial Sequence
  Description of Artificial Sequence: Synthetic peptide
PHQRNRMDP

SEQ ID NO: 46589 - protein, 9 aa, Artificial Sequence
  Description of Artificial Sequence: Synthetic peptide
QEPDSNRGV

SEQ ID NO: 46590 - protein, 9 aa, Artificial Sequence
  Description of Artificial Sequence: Synthetic peptide
SLPQPDTRY

SEQ ID NO: 46591 - protein, 9 aa, Artificial Sequence
  Description of Artificial Sequence: Synthetic peptide
FEPCPRSCW

SEQ ID NO: 46592 - protein, 9 aa, Artificial Sequence
  Description of Artificial Sequence: Synthetic peptide
KEPKMEKRG

SEQ ID NO: 46593 - protein, 9 aa, Artificial Sequence
  Description of Artificial Sequence: Synthetic peptide
PGDHRFYWP

SEQ ID NO: 46594 - protein, 9 aa, Artificial Sequence
  Description of Artificial Sequence: Synthetic peptide
ADTANILRH

SEQ ID NO: 46595 - protein, 9 aa, Artificial Sequence
  Description of Artificial Sequence: Synthetic peptide
KPCRDNQDV

SEQ ID NO: 46596 - protein, 9 aa, Artificial Sequence
  Description of Artificial Sequence: Synthetic peptide
LPPCYCQQY

SEQ ID NO: 46597 - protein, 9 aa, Artificial Sequence
  Description of Artificial Sequence: Synthetic peptide
PECIEGPNH

SEQ ID NO: 46598 - protein, 9 aa, Artificial Sequence
  Description of Artificial Sequence: Synthetic peptide
HDNKDVNRN

SEQ ID NO: 46599 - protein, 9 aa, Artificial Sequence
  Description of Artificial Sequence: Synthetic peptide
GEMTRCFRN

SEQ ID NO: 46600 - protein, 9 aa, Artificial Sequence
  Description of Artificial Sequence: Synthetic peptide
PDKEKVMPA

SEQ ID NO: 46601 - protein, 9 aa, Artificial Sequence
  Description of Artificial Sequence: Synthetic peptide
WNSPDDERV

SEQ ID NO: 46602 - protein, 9 aa, Artificial Sequence
  Description of Artificial Sequence: Synthetic peptide
VDRDDGKDY

SEQ ID NO: 46603 - protein, 9 aa, Artificial Sequence
  Description of Artificial Sequence: Synthetic peptide
DFEDELSKV

SEQ ID NO: 46604 - protein, 9 aa, Artificial Sequence
  Description of Artificial Sequence: Synthetic peptide
YEDGDHIVE

SEQ ID NO: 46605 - protein, 9 aa, Artificial Sequence
  Description of Artificial Sequence: Synthetic peptide
VEGEEILRI

SEQ ID NO: 46606 - protein, 9 aa, Artificial Sequence
  Description of Artificial Sequence: Synthetic peptide
CEWLDLMRT

SEQ ID NO: 46607 - protein, 9 aa, Artificial Sequence
  Description of Artificial Sequence: Synthetic peptide
HEAEDWRPF

SEQ ID NO: 46608 - protein, 9 aa, Artificial Sequence
  Description of Artificial Sequence: Synthetic peptide
KMPCEGEFT

SEQ ID NO: 46609 - protein, 9 aa, Artificial Sequence
  Description of Artificial Sequence: Synthetic peptide
GDPWEEWRK

SEQ ID NO: 46610 - protein, 9 aa, Artificial Sequence
  Description of Artificial Sequence: Synthetic peptide
HERWDANPY

SEQ ID NO: 46611 - protein, 9 aa, Artificial Sequence
  Description of Artificial Sequence: Synthetic peptide
PGCCDLTNI

SEQ ID NO: 46612 - protein, 9 aa, Artificial Sequence
  Description of Artificial Sequence: Synthetic peptide
PIIKGEPAD

SEQ ID NO: 46613 - protein, 9 aa, Artificial Sequence
  Description of Artificial Sequence: Synthetic peptide
PDTDDIIHW

SEQ ID NO: 46614 - protein, 9 aa, Artificial Sequence
  Description of Artificial Sequence: Synthetic peptide
EDLNEKSKS

SEQ ID NO: 46615 - protein, 9 aa, Artificial Sequence
  Description of Artificial Sequence: Synthetic peptide
EVDDGNVGE

SEQ ID NO: 46616 - protein, 9 aa, Artificial Sequence
  Description of Artificial Sequence: Synthetic peptide
DDWNEAKRN

SEQ ID NO: 46617 - protein, 9 aa, Artificial Sequence
  Description of Artificial Sequence: Synthetic peptide
PPDMPMSAD

SEQ ID NO: 46618 - protein, 9 aa, Artificial Sequence
  Description of Artificial Sequence: Synthetic peptide
QNPWDTDNH

SEQ ID NO: 46619 - protein, 9 aa, Artificial Sequence
  Description of Artificial Sequence: Synthetic peptide
PDTWAYAPH

SEQ ID NO: 46620 - protein, 9 aa, Artificial Sequence
  Description of Artificial Sequence: Synthetic peptide
TEPEIRNWF

SEQ ID NO: 46621 - protein, 9 aa, Artificial Sequence
  Description of Artificial Sequence: Synthetic peptide
FPSDPDGEH

SEQ ID NO: 46622 - protein, 9 aa, Artificial Sequence
  Description of Artificial Sequence: Synthetic peptide
PPPVVSPKP

SEQ ID NO: 46623 - protein, 9 aa, Artificial Sequence
  Description of Artificial Sequence: Synthetic peptide
FDPHNPCFR

SEQ ID NO: 46624 - protein, 9 aa, Artificial Sequence
  Description of Artificial Sequence: Synthetic peptide
ANAEPVHRC

SEQ ID NO: 46625 - protein, 9 aa, Artificial Sequence
  Description of Artificial Sequence: Synthetic peptide
LVPESQMHG

SEQ ID NO: 46626 - protein, 9 aa, Artificial Sequence
  Description of Artificial Sequence: Synthetic peptide
WERCPELNQ

SEQ ID NO: 46627 - protein, 9 aa, Artificial Sequence
  Description of Artificial Sequence: Synthetic peptide
MDEHREQRS

SEQ ID NO: 46628 - protein, 9 aa, Artificial Sequence
  Description of Artificial Sequence: Synthetic peptide
SDPEKYPWD

SEQ ID NO: 46629 - protein, 9 aa, Artificial Sequence
  Description of Artificial Sequence: Synthetic peptide
ERDDPRFSN

SEQ ID NO: 46630 - protein, 9 aa, Artificial Sequence
  Description of Artificial Sequence: Synthetic peptide
FDSSQEWKL

SEQ ID NO: 46631 - protein, 9 aa, Artificial Sequence
  Description of Artificial Sequence: Synthetic peptide
CRKNPTIHM

SEQ ID NO: 46632 - protein, 9 aa, Artificial Sequence
  Description of Artificial Sequence: Synthetic peptide
EAEEMGLKH

SEQ ID NO: 46633 - protein, 9 aa, Artificial Sequence
  Description of Artificial Sequence: Synthetic peptide
CKYLSHERL

SEQ ID NO: 46634 - protein, 9 aa, Artificial Sequence
  Description of Artificial Sequence: Synthetic peptide
IDPCDELFW

SEQ ID NO: 46635 - protein, 9 aa, Artificial Sequence
  Description of Artificial Sequence: Synthetic peptide
CKPTSDMKE

SEQ ID NO: 46636 - protein, 9 aa, Artificial Sequence
  Description of Artificial Sequence: Synthetic peptide
RPWEWWIRK

SEQ ID NO: 46637 - protein, 9 aa, Artificial Sequence
  Description of Artificial Sequence: Synthetic peptide
FEPQVEANT

SEQ ID NO: 46638 - protein, 9 aa, Artificial Sequence
  Description of Artificial Sequence: Synthetic peptide
LETAEKSKS

SEQ ID NO: 46639 - protein, 9 aa, Artificial Sequence
  Description of Artificial Sequence: Synthetic peptide
FDSCSRHRW

SEQ ID NO: 46640 - protein, 9 aa, Artificial Sequence
  Description of Artificial Sequence: Synthetic peptide
DNTDPDGSW

SEQ ID NO: 46641 - protein, 9 aa, Artificial Sequence
  Description of Artificial Sequence: Synthetic peptide
ADPQSVCCT

SEQ ID NO: 46642 - protein, 9 aa, Artificial Sequence
  Description of Artificial Sequence: Synthetic peptide
PHCQTVSDI

SEQ ID NO: 46643 - protein, 9 aa, Artificial Sequence
  Description of Artificial Sequence: Synthetic peptide
IEEPDTCLV

SEQ ID NO: 46644 - protein, 9 aa, Artificial Sequence
  Description of Artificial Sequence: Synthetic peptide
PEMQNDMDS

SEQ ID NO: 46645 - protein, 9 aa, Artificial Sequence
  Description of Artificial Sequence: Synthetic peptide
DHLPEDKRY

SEQ ID NO: 46646 - protein, 9 aa, Artificial Sequence
  Description of Artificial Sequence: Synthetic peptide
QENDANRPQ

SEQ ID NO: 46647 - protein, 9 aa, Artificial Sequence
  Description of Artificial Sequence: Synthetic peptide
KQGCEKNPM

SEQ ID NO: 46648 - protein, 9 aa, Artificial Sequence
  Description of Artificial Sequence: Synthetic peptide
HRCDPDMGR

SEQ ID NO: 46649 - protein, 9 aa, Artificial Sequence
  Description of Artificial Sequence: Synthetic peptide
DVPRDRKEN

SEQ ID NO: 46650 - protein, 9 aa, Artificial Sequence
  Description of Artificial Sequence: Synthetic peptide
EDNNNDVKH

SEQ ID NO: 46651 - protein, 9 aa, Artificial Sequence
  Description of Artificial Sequence: Synthetic peptide
IDFRPPNNT

SEQ ID NO: 46652 - protein, 9 aa, Artificial Sequence
  Description of Artificial Sequence: Synthetic peptide
DFPDKGELG

SEQ ID NO: 46653 - protein, 9 aa, Artificial Sequence
  Description of Artificial Sequence: Synthetic peptide
CIPDVAIMM

SEQ ID NO: 46654 - protein, 9 aa, Artificial Sequence
  Description of Artificial Sequence: Synthetic peptide
MEDHTAPRW

SEQ ID NO: 46655 - protein, 9 aa, Artificial Sequence
  Description of Artificial Sequence: Synthetic peptide
PENQQNHRD

SEQ ID NO: 46656 - protein, 9 aa, Artificial Sequence
  Description of Artificial Sequence: Synthetic peptide
CRKSETPWD

SEQ ID NO: 46657 - protein, 9 aa, Artificial Sequence
  Description of Artificial Sequence: Synthetic peptide
RIPPMMIML

SEQ ID NO: 46658 - protein, 9 aa, Artificial Sequence
  Description of Artificial Sequence: Synthetic peptide
PQPWNQQAF

SEQ ID NO: 46659 - protein, 9 aa, Artificial Sequence
  Description of Artificial Sequence: Synthetic peptide
CEIQGGQRY

SEQ ID NO: 46660 - protein, 9 aa, Artificial Sequence
  Description of Artificial Sequence: Synthetic peptide
VDFHDGFND

SEQ ID NO: 46661 - protein, 9 aa, Artificial Sequence
  Description of Artificial Sequence: Synthetic peptide
WDDHKLWRW

SEQ ID NO: 46662 - protein, 9 aa, Artificial Sequence
  Description of Artificial Sequence: Synthetic peptide
RDPFSPDPM

SEQ ID NO: 46663 - protein, 9 aa, Artificial Sequence
  Description of Artificial Sequence: Synthetic peptide
HLPRDDPVM

SEQ ID NO: 46664 - protein, 9 aa, Artificial Sequence
  Description of Artificial Sequence: Synthetic peptide
SDIPPNCRK

SEQ ID NO: 46665 - protein, 9 aa, Artificial Sequence
  Description of Artificial Sequence: Synthetic peptide
DPPRSKDDS

SEQ ID NO: 46666 - protein, 9 aa, Artificial Sequence
  Description of Artificial Sequence: Synthetic peptide
NDPDTSRTA

SEQ ID NO: 46667 - protein, 9 aa, Artificial Sequence
  Description of Artificial Sequence: Synthetic peptide
IDWPDNQKV

SEQ ID NO: 46668 - protein, 9 aa, Artificial Sequence
  Description of Artificial Sequence: Synthetic peptide
YDCENILRT

SEQ ID NO: 46669 - protein, 9 aa, Artificial Sequence
  Description of Artificial Sequence: Synthetic peptide
VEKPSEEPQ

SEQ ID NO: 46670 - protein, 9 aa, Artificial Sequence
  Description of Artificial Sequence: Synthetic peptide
LKPLPHFRE

SEQ ID NO: 46671 - protein, 9 aa, Artificial Sequence
  Description of Artificial Sequence: Synthetic peptide
HDEEEKNKA

SEQ ID NO: 46672 - protein, 9 aa, Artificial Sequence
  Description of Artificial Sequence: Synthetic peptide
PHGWEENDP

SEQ ID NO: 46673 - protein, 9 aa, Artificial Sequence
  Description of Artificial Sequence: Synthetic peptide
PLVGMDHRE

SEQ ID NO: 46674 - protein, 9 aa, Artificial Sequence
  Description of Artificial Sequence: Synthetic peptide
HRPEQLHEG

SEQ ID NO: 46675 - protein, 9 aa, Artificial Sequence
  Description of Artificial Sequence: Synthetic peptide
PGPHDQGPY

SEQ ID NO: 46676 - protein, 9 aa, Artificial Sequence
  Description of Artificial Sequence: Synthetic peptide
EVEDRSGWC

SEQ ID NO: 46677 - protein, 9 aa, Artificial Sequence
  Description of Artificial Sequence: Synthetic peptide
PEPDWVQEC

SEQ ID NO: 46678 - protein, 9 aa, Artificial Sequence
  Description of Artificial Sequence: Synthetic peptide
CRSEGWIHT

SEQ ID NO: 46679 - protein, 9 aa, Artificial Sequence
  Description of Artificial Sequence: Synthetic peptide
PETTSRWKW

SEQ ID NO: 46680 - protein, 9 aa, Artificial Sequence
  Description of Artificial Sequence: Synthetic peptide
RDYQDFICY

SEQ ID NO: 46681 - protein, 9 aa, Artificial Sequence
  Description of Artificial Sequence: Synthetic peptide
CDFQSSWDQ

SEQ ID NO: 46682 - protein, 9 aa, Artificial Sequence
  Description of Artificial Sequence: Synthetic peptide
IECFPRESI

SEQ ID NO: 46683 - protein, 9 aa, Artificial Sequence
  Description of Artificial Sequence: Synthetic peptide
PERASEMFW

SEQ ID NO: 46684 - protein, 9 aa, Artificial Sequence
  Description of Artificial Sequence: Synthetic peptide
NYPRDHRQH

SEQ ID NO: 46685 - protein, 9 aa, Artificial Sequence
  Description of Artificial Sequence: Synthetic peptide
FEAHDRPSN

SEQ ID NO: 46686 - protein, 9 aa, Artificial Sequence
  Description of Artificial Sequence: Synthetic peptide
WEMNDMQDY

SEQ ID NO: 46687 - protein, 9 aa, Artificial Sequence
  Description of Artificial Sequence: Synthetic peptide
LDTCEMLKQ

SEQ ID NO: 46688 - protein, 9 aa, Artificial Sequence
  Description of Artificial Sequence: Synthetic peptide
QFPEFDRET

SEQ ID NO: 46689 - protein, 9 aa, Artificial Sequence
  Description of Artificial Sequence: Synthetic peptide
PVPHPEKEF

SEQ ID NO: 46690 - protein, 9 aa, Artificial Sequence
  Description of Artificial Sequence: Synthetic peptide
EFDEFNTRG

SEQ ID NO: 46691 - protein, 9 aa, Artificial Sequence
  Description of Artificial Sequence: Synthetic peptide
GDQAGATRF

SEQ ID NO: 46692 - protein, 9 aa, Artificial Sequence
  Description of Artificial Sequence: Synthetic peptide
EPPTNDART

SEQ ID NO: 46693 - protein, 9 aa, Artificial Sequence
  Description of Artificial Sequence: Synthetic peptide
AEVGTEHKV

SEQ ID NO: 46694 - protein, 9 aa, Artificial Sequence
  Description of Artificial Sequence: Synthetic peptide
DDPSGQLRL

SEQ ID NO: 46695 - protein, 9 aa, Artificial Sequence
  Description of Artificial Sequence: Synthetic peptide
EDPHSKKEH

SEQ ID NO: 46696 - protein, 9 aa, Artificial Sequence
  Description of Artificial Sequence: Synthetic peptide
CRKEQGQRT

SEQ ID NO: 46697 - protein, 9 aa, Artificial Sequence
  Description of Artificial Sequence: Synthetic peptide
PEAGGKSWD

SEQ ID NO: 46698 - protein, 9 aa, Artificial Sequence
  Description of Artificial Sequence: Synthetic peptide
PWDPEEDGD

SEQ ID NO: 46699 - protein, 9 aa, Artificial Sequence
  Description of Artificial Sequence: Synthetic peptide
ENPEMMGFE

SEQ ID NO: 46700 - protein, 9 aa, Artificial Sequence
  Description of Artificial Sequence: Synthetic peptide
MNPNEKGGL

SEQ ID NO: 46701 - protein, 9 aa, Artificial Sequence
  Description of Artificial Sequence: Synthetic peptide
PDAAERKGV

SEQ ID NO: 46702 - protein, 9 aa, Artificial Sequence
  Description of Artificial Sequence: Synthetic peptide
EPPDGQVDA

SEQ ID NO: 46703 - protein, 9 aa, Artificial Sequence
  Description of Artificial Sequence: Synthetic peptide
FDANDCRPS

SEQ ID NO: 46704 - protein, 9 aa, Artificial Sequence
  Description of Artificial Sequence: Synthetic peptide
FRSHDREEN

SEQ ID NO: 46705 - protein, 9 aa, Artificial Sequence
  Description of Artificial Sequence: Synthetic peptide
IKCEEPMRL

SEQ ID NO: 46706 - protein, 9 aa, Artificial Sequence
  Description of Artificial Sequence: Synthetic peptide
FIPDTDNWG

SEQ ID NO: 46707 - protein, 9 aa, Artificial Sequence
  Description of Artificial Sequence: Synthetic peptide
IDCRSRLEE

SEQ ID NO: 46708 - protein, 9 aa, Artificial Sequence
  Description of Artificial Sequence: Synthetic peptide
CKEQPTERF

SEQ ID NO: 46709 - protein, 9 aa, Artificial Sequence
  Description of Artificial Sequence: Synthetic peptide
DDMEDQQQY

SEQ ID NO: 46710 - protein, 9 aa, Artificial Sequence
  Description of Artificial Sequence: Synthetic peptide
DKPEQLKEH

SEQ ID NO: 46711 - protein, 9 aa, Artificial Sequence
  Description of Artificial Sequence: Synthetic peptide
PDSHKQPDC

SEQ ID NO: 46712 - protein, 9 aa, Artificial Sequence
  Description of Artificial Sequence: Synthetic peptide
CDPSVEDRV

SEQ ID NO: 46713 - protein, 9 aa, Artificial Sequence
  Description of Artificial Sequence: Synthetic peptide
PEGCHHQEE

SEQ ID NO: 46714 - protein, 9 aa, Artificial Sequence
  Description of Artificial Sequence: Synthetic peptide
FDPCQGGEQ

SEQ ID NO: 46715 - protein, 9 aa, Artificial Sequence
  Description of Artificial Sequence: Synthetic peptide
NDEDNMSRH

SEQ ID NO: 46716 - protein, 9 aa, Artificial Sequence
  Description of Artificial Sequence: Synthetic peptide
PECLPKNSC

SEQ ID NO: 46717 - protein, 9 aa, Artificial Sequence
  Description of Artificial Sequence: Synthetic peptide
AEDASRDLF

SEQ ID NO: 46718 - protein, 9 aa, Artificial Sequence
  Description of Artificial Sequence: Synthetic peptide
CNPRPQMVG

SEQ ID NO: 46719 - protein, 9 aa, Artificial Sequence
  Description of Artificial Sequence: Synthetic peptide
CDDHAKRNA

SEQ ID NO: 46720 - protein, 9 aa, Artificial Sequence
  Description of Artificial Sequence: Synthetic peptide
MRNYPDARF

SEQ ID NO: 46721 - protein, 9 aa, Artificial Sequence
  Description of Artificial Sequence: Synthetic peptide
DNPPGRRKP

SEQ ID NO: 46722 - protein, 9 aa, Artificial Sequence
  Description of Artificial Sequence: Synthetic peptide
PDNSDATHQ

SEQ ID NO: 46723 - protein, 9 aa, Artificial Sequence
  Description of Artificial Sequence: Synthetic peptide
MDCKEWNKQ

SEQ ID NO: 46724 - protein, 9 aa, Artificial Sequence
  Description of Artificial Sequence: Synthetic peptide
GNQCELNPH

SEQ ID NO: 46725 - protein, 9 aa, Artificial Sequence
  Description of Artificial Sequence: Synthetic peptide
PNYKKRSTV

SEQ ID NO: 46726 - protein, 9 aa, Artificial Sequence
  Description of Artificial Sequence: Synthetic peptide
LRCCGMETE

SEQ ID NO: 46727 - protein, 9 aa, Artificial Sequence
  Description of Artificial Sequence: Synthetic peptide
PPDMQSAKW

SEQ ID NO: 46728 - protein, 9 aa, Artificial Sequence
  Description of Artificial Sequence: Synthetic peptide
DHPSNDAEM

SEQ ID NO: 46729 - protein, 9 aa, Artificial Sequence
  Description of Artificial Sequence: Synthetic peptide
RIPGSRPPQ

SEQ ID NO: 46730 - protein, 9 aa, Artificial Sequence
  Description of Artificial Sequence: Synthetic peptide
WDPNQGGAT

SEQ ID NO: 46731 - protein, 9 aa, Artificial Sequence
  Description of Artificial Sequence: Synthetic peptide
PSCAPCLEK

SEQ ID NO: 46732 - protein, 9 aa, Artificial Sequence
  Description of Artificial Sequence: Synthetic peptide
IDSHCKMRE

SEQ ID NO: 46733 - protein, 9 aa, Artificial Sequence
  Description of Artificial Sequence: Synthetic peptide
CEYDGTMDT

SEQ ID NO: 46734 - protein, 9 aa, Artificial Sequence
  Description of Artificial Sequence: Synthetic peptide
EVADENGNY

SEQ ID NO: 46735 - protein, 9 aa, Artificial Sequence
  Description of Artificial Sequence: Synthetic peptide
PQPNIPVRW

SEQ ID NO: 46736 - protein, 9 aa, Artificial Sequence
  Description of Artificial Sequence: Synthetic peptide
WDYNSIFPG

SEQ ID NO: 46737 - protein, 9 aa, Artificial Sequence
  Description of Artificial Sequence: Synthetic peptide
IHSNDQPKG

SEQ ID NO: 46738 - protein, 9 aa, Artificial Sequence
  Description of Artificial Sequence: Synthetic peptide
PHDLKHQRS

SEQ ID NO: 46739 - protein, 9 aa, Artificial Sequence
  Description of Artificial Sequence: Synthetic peptide
PIPLMMHDE

SEQ ID NO: 46740 - protein, 9 aa, Artificial Sequence
  Description of Artificial Sequence: Synthetic peptide
FDCLPDREH

SEQ ID NO: 46741 - protein, 9 aa, Artificial Sequence
  Description of Artificial Sequence: Synthetic peptide
PNDWHIAYG

SEQ ID NO: 46742 - protein, 9 aa, Artificial Sequence
  Description of Artificial Sequence: Synthetic peptide
LDTKRTFKK

SEQ ID NO: 46743 - protein, 9 aa, Artificial Sequence
  Description of Artificial Sequence: Synthetic peptide
CDRASDEGK

SEQ ID NO: 46744 - protein, 9 aa, Artificial Sequence
  Description of Artificial Sequence: Synthetic peptide
DDSSQEKRW

SEQ ID NO: 46745 - protein, 9 aa, Artificial Sequence
  Description of Artificial Sequence: Synthetic peptide
PEHQDEQSC

SEQ ID NO: 46746 - protein, 9 aa, Artificial Sequence
  Description of Artificial Sequence: Synthetic peptide
TEPETYPAT

SEQ ID NO: 46747 - protein, 9 aa, Artificial Sequence
  Description of Artificial Sequence: Synthetic peptide
FKDWDHHTV

SEQ ID NO: 46748 - protein, 9 aa, Artificial Sequence
  Description of Artificial Sequence: Synthetic peptide
WKTCPQEAY

SEQ ID NO: 46749 - protein, 9 aa, Artificial Sequence
  Description of Artificial Sequence: Synthetic peptide
EEKDEQERA

SEQ ID NO: 46750 - protein, 9 aa, Artificial Sequence
  Description of Artificial Sequence: Synthetic peptide
WPNTPWEPH

SEQ ID NO: 46751 - protein, 9 aa, Artificial Sequence
  Description of Artificial Sequence: Synthetic peptide
CPTGDQQKW

SEQ ID NO: 46752 - protein, 9 aa, Artificial Sequence
  Description of Artificial Sequence: Synthetic peptide
RPCMQQDPH

SEQ ID NO: 46753 - protein, 9 aa, Artificial Sequence
  Description of Artificial Sequence: Synthetic peptide
CDAGLISKM

SEQ ID NO: 46754 - protein, 9 aa, Artificial Sequence
  Description of Artificial Sequence: Synthetic peptide
EASDMSIEK

SEQ ID NO: 46755 - protein, 9 aa, Artificial Sequence
  Description of Artificial Sequence: Synthetic peptide
AEPRAIWRH

SEQ ID NO: 46756 - protein, 9 aa, Artificial Sequence
  Description of Artificial Sequence: Synthetic peptide
FHISPKEKW

SEQ ID NO: 46757 - protein, 9 aa, Artificial Sequence
  Description of Artificial Sequence: Synthetic peptide
PIPPIKTHS

SEQ ID NO: 46758 - protein, 9 aa, Artificial Sequence
  Description of Artificial Sequence: Synthetic peptide
PDPQNHQFV

SEQ ID NO: 46759 - protein, 9 aa, Artificial Sequence
  Description of Artificial Sequence: Synthetic peptide
TEVEQLPRA

SEQ ID NO: 46760 - protein, 9 aa, Artificial Sequence
  Description of Artificial Sequence: Synthetic peptide
IDPNNLTSM

SEQ ID NO: 46761 - protein, 9 aa, Artificial Sequence
  Description of Artificial Sequence: Synthetic peptide
LGDEPWAKF

SEQ ID NO: 46762 - protein, 9 aa, Artificial Sequence
  Description of Artificial Sequence: Synthetic peptide
LNHCDKEDH

SEQ ID NO: 46763 - protein, 9 aa, Artificial Sequence
  Description of Artificial Sequence: Synthetic peptide
WEDHDLHRN

SEQ ID NO: 46764 - protein, 9 aa, Artificial Sequence
  Description of Artificial Sequence: Synthetic peptide
PALYRRKTD

SEQ ID NO: 46765 - protein, 9 aa, Artificial Sequence
  Description of Artificial Sequence: Synthetic peptide
NEDIPDPPH

SEQ ID NO: 46766 - protein, 9 aa, Artificial Sequence
  Description of Artificial Sequence: Synthetic peptide
WEIQDVIRV

SEQ ID NO: 46767 - protein, 9 aa, Artificial Sequence
  Description of Artificial Sequence: Synthetic peptide
PENWNTGKH

SEQ ID NO: 46768 - protein, 9 aa, Artificial Sequence
  Description of Artificial Sequence: Synthetic peptide
PDRYPAFEM

SEQ ID NO: 46769 - protein, 9 aa, Artificial Sequence
  Description of Artificial Sequence: Synthetic peptide
HNPWFSCRW

SEQ ID NO: 46770 - protein, 9 aa, Artificial Sequence
  Description of Artificial Sequence: Synthetic peptide
INQKETWKF

SEQ ID NO: 46771 - protein, 9 aa, Artificial Sequence
  Description of Artificial Sequence: Synthetic peptide
PVPYSGPKQ

SEQ ID NO: 46772 - protein, 9 aa, Artificial Sequence
  Description of Artificial Sequence: Synthetic peptide
YEREPRMFH

SEQ ID NO: 46773 - protein, 9 aa, Artificial Sequence
  Description of Artificial Sequence: Synthetic peptide
LDEEPVFVG

SEQ ID NO: 46774 - protein, 9 aa, Artificial Sequence
  Description of Artificial Sequence: Synthetic peptide
PVDADHQLW

SEQ ID NO: 46775 - protein, 9 aa, Artificial Sequence
  Description of Artificial Sequence: Synthetic peptide
RPPHVGPAL

SEQ ID NO: 46776 - protein, 9 aa, Artificial Sequence
  Description of Artificial Sequence: Synthetic peptide
ADPTTETPH

SEQ ID NO: 46777 - protein, 9 aa, Artificial Sequence
  Description of Artificial Sequence: Synthetic peptide
PDWWPRCKP

SEQ ID NO: 46778 - protein, 9 aa, Artificial Sequence
  Description of Artificial Sequence: Synthetic peptide
YQPRSTPPG

SEQ ID NO: 46779 - protein, 9 aa, Artificial Sequence
  Description of Artificial Sequence: Synthetic peptide
NNGDDRRQH

SEQ ID NO: 46780 - protein, 9 aa, Artificial Sequence
  Description of Artificial Sequence: Synthetic peptide
REWKDNCKQ

SEQ ID NO: 46781 - protein, 9 aa, Artificial Sequence
  Description of Artificial Sequence: Synthetic peptide
PDDWSGTLY

SEQ ID NO: 46782 - protein, 9 aa, Artificial Sequence
  Description of Artificial Sequence: Synthetic peptide
PEVYPGGTT

SEQ ID NO: 46783 - protein, 9 aa, Artificial Sequence
  Description of Artificial Sequence: Synthetic peptide
PKCCCKCDW

SEQ ID NO: 46784 - protein, 9 aa, Artificial Sequence
  Description of Artificial Sequence: Synthetic peptide
PDCRWGEDN

SEQ ID NO: 46785 - protein, 9 aa, Artificial Sequence
  Description of Artificial Sequence: Synthetic peptide
CDLPMSWRV

SEQ ID NO: 46786 - protein, 9 aa, Artificial Sequence
  Description of Artificial Sequence: Synthetic peptide
PEDCDDRIS

SEQ ID NO: 46787 - protein, 9 aa, Artificial Sequence
  Description of Artificial Sequence: Synthetic peptide
QDCEPEYDF

SEQ ID NO: 46788 - protein, 9 aa, Artificial Sequence
  Description of Artificial Sequence: Synthetic peptide
DVSEDHFND

SEQ ID NO: 46789 - protein, 9 aa, Artificial Sequence
  Description of Artificial Sequence: Synthetic peptide
PKQLDQPTN

SEQ ID NO: 46790 - protein, 9 aa, Artificial Sequence
  Description of Artificial Sequence: Synthetic peptide
EFHDMDMVT

SEQ ID NO: 46791 - protein, 9 aa, Artificial Sequence
  Description of Artificial Sequence: Synthetic peptide
CEHPESKDV

SEQ ID NO: 46792 - protein, 9 aa, Artificial Sequence
  Description of Artificial Sequence: Synthetic peptide
TEHKDHFET

SEQ ID NO: 46793 - protein, 9 aa, Artificial Sequence
  Description of Artificial Sequence: Synthetic peptide
PSNEPSVKT

SEQ ID NO: 46794 - protein, 9 aa, Artificial Sequence
  Description of Artificial Sequence: Synthetic peptide
GEVTGHERN

SEQ ID NO: 46795 - protein, 9 aa, Artificial Sequence
  Description of Artificial Sequence: Synthetic peptide
PNPQSHLHI

SEQ ID NO: 46796 - protein, 9 aa, Artificial Sequence
  Description of Artificial Sequence: Synthetic peptide
CPRCDSRPA

SEQ ID NO: 46797 - protein, 9 aa, Artificial Sequence
  Description of Artificial Sequence: Synthetic peptide
MEDNTVCSV

SEQ ID NO: 46798 - protein, 9 aa, Artificial Sequence
  Description of Artificial Sequence: Synthetic peptide
QPPRRAMKM

SEQ ID NO: 46799 - protein, 9 aa, Artificial Sequence
  Description of Artificial Sequence: Synthetic peptide
SLPEEHPFE

SEQ ID NO: 46800 - protein, 9 aa, Artificial Sequence
  Description of Artificial Sequence: Synthetic peptide
ANPLFKCIS

SEQ ID NO: 46801 - protein, 9 aa, Artificial Sequence
  Description of Artificial Sequence: Synthetic peptide
DQSEDLDQG

SEQ ID NO: 46802 - protein, 9 aa, Artificial Sequence
  Description of Artificial Sequence: Synthetic peptide
DDPEYTLCL

SEQ ID NO: 46803 - protein, 9 aa, Artificial Sequence
  Description of Artificial Sequence: Synthetic peptide
KFPYLPHRN

SEQ ID NO: 46804 - protein, 9 aa, Artificial Sequence
  Description of Artificial Sequence: Synthetic peptide
PVGNKDSRY

SEQ ID NO: 46805 - protein, 9 aa, Artificial Sequence
  Description of Artificial Sequence: Synthetic peptide
WDVDHKLRM

SEQ ID NO: 46806 - protein, 9 aa, Artificial Sequence
  Description of Artificial Sequence: Synthetic peptide
PQHGAETPH

SEQ ID NO: 46807 - protein, 9 aa, Artificial Sequence
  Description of Artificial Sequence: Synthetic peptide
PHREEDDHC

SEQ ID NO: 46808 - protein, 9 aa, Artificial Sequence
  Description of Artificial Sequence: Synthetic peptide
CVPNPLGHI

SEQ ID NO: 46809 - protein, 9 aa, Artificial Sequence
  Description of Artificial Sequence: Synthetic peptide
NDTGPHGRH

SEQ ID NO: 46810 - protein, 9 aa, Artificial Sequence
  Description of Artificial Sequence: Synthetic peptide
DDTENLREI

SEQ ID NO: 46811 - protein, 9 aa, Artificial Sequence
  Description of Artificial Sequence: Synthetic peptide
VDPWDPAQP

SEQ ID NO: 46812 - protein, 9 aa, Artificial Sequence
  Description of Artificial Sequence: Synthetic peptide
CDPWDWEIE

SEQ ID NO: 46813 - protein, 9 aa, Artificial Sequence
  Description of Artificial Sequence: Synthetic peptide
EQPHDPSST

SEQ ID NO: 46814 - protein, 9 aa, Artificial Sequence
  Description of Artificial Sequence: Synthetic peptide
PVPCNTVKF

SEQ ID NO: 46815 - protein, 9 aa, Artificial Sequence
  Description of Artificial Sequence: Synthetic peptide
KMPNELGYY

SEQ ID NO: 46816 - protein, 9 aa, Artificial Sequence
  Description of Artificial Sequence: Synthetic peptide
KEREERRFW

SEQ ID NO: 46817 - protein, 9 aa, Artificial Sequence
  Description of Artificial Sequence: Synthetic peptide
DFPEPYYGF

SEQ ID NO: 46818 - protein, 9 aa, Artificial Sequence
  Description of Artificial Sequence: Synthetic peptide
QDQRRQKRM

SEQ ID NO: 46819 - protein, 9 aa, Artificial Sequence
  Description of Artificial Sequence: Synthetic peptide
PRHTMLGPS

SEQ ID NO: 46820 - protein, 9 aa, Artificial Sequence
  Description of Artificial Sequence: Synthetic peptide
DDREKCNWM

SEQ ID NO: 46821 - protein, 9 aa, Artificial Sequence
  Description of Artificial Sequence: Synthetic peptide
FEQWKDQKV

SEQ ID NO: 46822 - protein, 9 aa, Artificial Sequence
  Description of Artificial Sequence: Synthetic peptide
LRPCEGEQD

SEQ ID NO: 46823 - protein, 9 aa, Artificial Sequence
  Description of Artificial Sequence: Synthetic peptide
CPTKPRYPS

SEQ ID NO: 46824 - protein, 9 aa, Artificial Sequence
  Description of Artificial Sequence: Synthetic peptide
PSESKLMNY

SEQ ID NO: 46825 - protein, 9 aa, Artificial Sequence
  Description of Artificial Sequence: Synthetic peptide
CDKNWTLQQ

SEQ ID NO: 46826 - protein, 9 aa, Artificial Sequence
  Description of Artificial Sequence: Synthetic peptide
PSPPPGHNA

SEQ ID NO: 46827 - protein, 9 aa, Artificial Sequence
  Description of Artificial Sequence: Synthetic peptide
IKPEPNWSS

SEQ ID NO: 46828 - protein, 9 aa, Artificial Sequence
  Description of Artificial Sequence: Synthetic peptide
PEETRHNDC

SEQ ID NO: 46829 - protein, 9 aa, Artificial Sequence
  Description of Artificial Sequence: Synthetic peptide
DDVQVEPKW

SEQ ID NO: 46830 - protein, 9 aa, Artificial Sequence
  Description of Artificial Sequence: Synthetic peptide
PQNGMLHYS

SEQ ID NO: 46831 - protein, 9 aa, Artificial Sequence
  Description of Artificial Sequence: Synthetic peptide
FDSRHIEKP

SEQ ID NO: 46832 - protein, 9 aa, Artificial Sequence
  Description of Artificial Sequence: Synthetic peptide
HEKHSLDRY

SEQ ID NO: 46833 - protein, 9 aa, Artificial Sequence
  Description of Artificial Sequence: Synthetic peptide
ETPDDWNCY

SEQ ID NO: 46834 - protein, 9 aa, Artificial Sequence
  Description of Artificial Sequence: Synthetic peptide
CDAEAGFRR

SEQ ID NO: 46835 - protein, 9 aa, Artificial Sequence
  Description of Artificial Sequence: Synthetic peptide
EEFGPTKPM

SEQ ID NO: 46836 - protein, 9 aa, Artificial Sequence
  Description of Artificial Sequence: Synthetic peptide
DVPQKAHND

SEQ ID NO: 46837 - protein, 9 aa, Artificial Sequence
  Description of Artificial Sequence: Synthetic peptide
IHPCEGSQT

SEQ ID NO: 46838 - protein, 9 aa, Artificial Sequence
  Description of Artificial Sequence: Synthetic peptide
VDLQQEDIY

SEQ ID NO: 46839 - protein, 9 aa, Artificial Sequence
  Description of Artificial Sequence: Synthetic peptide
AFPDNSKTE

SEQ ID NO: 46840 - protein, 9 aa, Artificial Sequence
  Description of Artificial Sequence: Synthetic peptide
EELASSDKY

SEQ ID NO: 46841 - protein, 9 aa, Artificial Sequence
  Description of Artificial Sequence: Synthetic peptide
EEYTGECRG

SEQ ID NO: 46842 - protein, 9 aa, Artificial Sequence
  Description of Artificial Sequence: Synthetic peptide
NIDDKPSMQ

SEQ ID NO: 46843 - protein, 9 aa, Artificial Sequence
  Description of Artificial Sequence: Synthetic peptide
WPPEPWCCC

SEQ ID NO: 46844 - protein, 9 aa, Artificial Sequence
  Description of Artificial Sequence: Synthetic peptide
IDPFCAVRI

SEQ ID NO: 46845 - protein, 9 aa, Artificial Sequence
  Description of Artificial Sequence: Synthetic peptide
DEYCQWIRS

SEQ ID NO: 46846 - protein, 9 aa, Artificial Sequence
  Description of Artificial Sequence: Synthetic peptide
PQDEWQNRV

SEQ ID NO: 46847 - protein, 9 aa, Artificial Sequence
  Description of Artificial Sequence: Synthetic peptide
LNPHVSQIW

SEQ ID NO: 46848 - protein, 9 aa, Artificial Sequence
  Description of Artificial Sequence: Synthetic peptide
MDPYEVTSC

SEQ ID NO: 46849 - protein, 9 aa, Artificial Sequence
  Description of Artificial Sequence: Synthetic peptide
WDAFEPMRY

SEQ ID NO: 46850 - protein, 9 aa, Artificial Sequence
  Description of Artificial Sequence: Synthetic peptide
YDFSERKCF

SEQ ID NO: 46851 - protein, 9 aa, Artificial Sequence
  Description of Artificial Sequence: Synthetic peptide
MDPNHVHAG

SEQ ID NO: 46852 - protein, 9 aa, Artificial Sequence
  Description of Artificial Sequence: Synthetic peptide
FDCFDRNLC

SEQ ID NO: 46853 - protein, 9 aa, Artificial Sequence
  Description of Artificial Sequence: Synthetic peptide
YDTDDAQPN

SEQ ID NO: 46854 - protein, 9 aa, Artificial Sequence
  Description of Artificial Sequence: Synthetic peptide
WDPHKENTM

SEQ ID NO: 46855 - protein, 9 aa, Artificial Sequence
  Description of Artificial Sequence: Synthetic peptide
RDPNAQGWT

SEQ ID NO: 46856 - protein, 9 aa, Artificial Sequence
  Description of Artificial Sequence: Synthetic peptide
EWPHIDAGK

SEQ ID NO: 46857 - protein, 9 aa, Artificial Sequence
  Description of Artificial Sequence: Synthetic peptide
EMDEKLDGK

SEQ ID NO: 46858 - protein, 9 aa, Artificial Sequence
  Description of Artificial Sequence: Synthetic peptide
CQPPEEGMV

SEQ ID NO: 46859 - protein, 9 aa, Artificial Sequence
  Description of Artificial Sequence: Synthetic peptide
PPANDVPHQ

SEQ ID NO: 46860 - protein, 9 aa, Artificial Sequence
  Description of Artificial Sequence: Synthetic peptide
IECSPRETI

SEQ ID NO: 46861 - protein, 9 aa, Artificial Sequence
  Description of Artificial Sequence: Synthetic peptide
VDIHKEMRV

SEQ ID NO: 46862 - protein, 9 aa, Artificial Sequence
  Description of Artificial Sequence: Synthetic peptide
PAEHDPNQV

SEQ ID NO: 46863 - protein, 9 aa, Artificial Sequence
  Description of Artificial Sequence: Synthetic peptide
PKPPPHYEQ

SEQ ID NO: 46864 - protein, 9 aa, Artificial Sequence
  Description of Artificial Sequence: Synthetic peptide
PGNPENDPN

SEQ ID NO: 46865 - protein, 9 aa, Artificial Sequence
  Description of Artificial Sequence: Synthetic peptide
DWNLEDDRA

SEQ ID NO: 46866 - protein, 9 aa, Artificial Sequence
  Description of Artificial Sequence: Synthetic peptide
CEYWHQVRP

SEQ ID NO: 46867 - protein, 9 aa, Artificial Sequence
  Description of Artificial Sequence: Synthetic peptide
HDPCTQIKP

SEQ ID NO: 46868 - protein, 9 aa, Artificial Sequence
  Description of Artificial Sequence: Synthetic peptide
CECKPICAT

SEQ ID NO: 46869 - protein, 9 aa, Artificial Sequence
  Description of Artificial Sequence: Synthetic peptide
PRVDNGNQL

SEQ ID NO: 46870 - protein, 9 aa, Artificial Sequence
  Description of Artificial Sequence: Synthetic peptide
PHESCECSG

SEQ ID NO: 46871 - protein, 9 aa, Artificial Sequence
  Description of Artificial Sequence: Synthetic peptide
ADTKRKRRT

SEQ ID NO: 46872 - protein, 9 aa, Artificial Sequence
  Description of Artificial Sequence: Synthetic peptide
DEPRDWGAQ

SEQ ID NO: 46873 - protein, 9 aa, Artificial Sequence
  Description of Artificial Sequence: Synthetic peptide
INEDAQEKM

SEQ ID NO: 46874 - protein, 9 aa, Artificial Sequence
  Description of Artificial Sequence: Synthetic peptide
LNSEPKCRA

SEQ ID NO: 46875 - protein, 9 aa, Artificial Sequence
  Description of Artificial Sequence: Synthetic peptide
PMPNTGDEE

SEQ ID NO: 46876 - protein, 9 aa, Artificial Sequence
  Description of Artificial Sequence: Synthetic peptide
TVDEQGIQH

SEQ ID NO: 46877 - protein, 9 aa, Artificial Sequence
  Description of Artificial Sequence: Synthetic peptide
FDGCSKMPM

SEQ ID NO: 46878 - protein, 9 aa, Artificial Sequence
  Description of Artificial Sequence: Synthetic peptide
AEPDTIDWD

SEQ ID NO: 46879 - protein, 9 aa, Artificial Sequence
  Description of Artificial Sequence: Synthetic peptide
DIWDTEVQE

SEQ ID NO: 46880 - protein, 9 aa, Artificial Sequence
  Description of Artificial Sequence: Synthetic peptide
PQDLKPGNS

SEQ ID NO: 46881 - protein, 9 aa, Artificial Sequence
  Description of Artificial Sequence: Synthetic peptide
IDRCDVLQH

SEQ ID NO: 46882 - protein, 9 aa, Artificial Sequence
  Description of Artificial Sequence: Synthetic peptide
HDPWNVLDW

SEQ ID NO: 46883 - protein, 9 aa, Artificial Sequence
  Description of Artificial Sequence: Synthetic peptide
EDPCSPAAQ

SEQ ID NO: 46884 - protein, 9 aa, Artificial Sequence
  Description of Artificial Sequence: Synthetic peptide
MNTNENCRK

SEQ ID NO: 46885 - protein, 9 aa, Artificial Sequence
  Description of Artificial Sequence: Synthetic peptide
CKHVDWDSK

SEQ ID NO: 46886 - protein, 9 aa, Artificial Sequence
  Description of Artificial Sequence: Synthetic peptide
SEGMDRDRC

SEQ ID NO: 46887 - protein, 9 aa, Artificial Sequence
  Description of Artificial Sequence: Synthetic peptide
YKELDRDPQ

SEQ ID NO: 46888 - protein, 9 aa, Artificial Sequence
  Description of Artificial Sequence: Synthetic peptide
PRLQSRKYL

SEQ ID NO: 46889 - protein, 9 aa, Artificial Sequence
  Description of Artificial Sequence: Synthetic peptide
PGLWIAPDH

SEQ ID NO: 46890 - protein, 9 aa, Artificial Sequence
  Description of Artificial Sequence: Synthetic peptide
PYLHSKQDK

SEQ ID NO: 46891 - protein, 9 aa, Artificial Sequence
  Description of Artificial Sequence: Synthetic peptide
PQCHDHRQD

SEQ ID NO: 46892 - protein, 9 aa, Artificial Sequence
  Description of Artificial Sequence: Synthetic peptide
EQPTQTPFS

SEQ ID NO: 46893 - protein, 9 aa, Artificial Sequence
  Description of Artificial Sequence: Synthetic peptide
HPPKRHIPC

SEQ ID NO: 46894 - protein, 9 aa, Artificial Sequence
  Description of Artificial Sequence: Synthetic peptide
VDTQKTERA

SEQ ID NO: 46895 - protein, 9 aa, Artificial Sequence
  Description of Artificial Sequence: Synthetic peptide
DVDDLVEIM

SEQ ID NO: 46896 - protein, 9 aa, Artificial Sequence
  Description of Artificial Sequence: Synthetic peptide
CELNGKIDL

SEQ ID NO: 46897 - protein, 9 aa, Artificial Sequence
  Description of Artificial Sequence: Synthetic peptide
EEENCEQGN

SEQ ID NO: 46898 - protein, 9 aa, Artificial Sequence
  Description of Artificial Sequence: Synthetic peptide
DEDERTLDI

SEQ ID NO: 46899 - protein, 9 aa, Artificial Sequence
  Description of Artificial Sequence: Synthetic peptide
YPPSQEIKT

SEQ ID NO: 46900 - protein, 9 aa, Artificial Sequence
  Description of Artificial Sequence: Synthetic peptide
PHSEEGREI

SEQ ID NO: 46901 - protein, 9 aa, Artificial Sequence
  Description of Artificial Sequence: Synthetic peptide
EQPECETNV

SEQ ID NO: 46902 - protein, 9 aa, Artificial Sequence
  Description of Artificial Sequence: Synthetic peptide
PHCNDGSEP

SEQ ID NO: 46903 - protein, 9 aa, Artificial Sequence
  Description of Artificial Sequence: Synthetic peptide
CECWGCTRG

SEQ ID NO: 46904 - protein, 9 aa, Artificial Sequence
  Description of Artificial Sequence: Synthetic peptide
PNDFTTHGA

SEQ ID NO: 46905 - protein, 9 aa, Artificial Sequence
  Description of Artificial Sequence: Synthetic peptide
CDTNPQDQV

SEQ ID NO: 46906 - protein, 9 aa, Artificial Sequence
  Description of Artificial Sequence: Synthetic peptide
PRWQSEECQ

SEQ ID NO: 46907 - protein, 9 aa, Artificial Sequence
  Description of Artificial Sequence: Synthetic peptide
VEATPKSPN

SEQ ID NO: 46908 - protein, 9 aa, Artificial Sequence
  Description of Artificial Sequence: Synthetic peptide
PEEGSPAEY

SEQ ID NO: 46909 - protein, 9 aa, Artificial Sequence
  Description of Artificial Sequence: Synthetic peptide
DTFQADKRY

SEQ ID NO: 46910 - protein, 9 aa, Artificial Sequence
  Description of Artificial Sequence: Synthetic peptide
PYEKEKKKD

SEQ ID NO: 46911 - protein, 9 aa, Artificial Sequence
  Description of Artificial Sequence: Synthetic peptide
DFYHHDDRG

SEQ ID NO: 46912 - protein, 9 aa, Artificial Sequence
  Description of Artificial Sequence: Synthetic peptide
DTEEPVVNP

SEQ ID NO: 46913 - protein, 9 aa, Artificial Sequence
  Description of Artificial Sequence: Synthetic peptide
PNEPNEEHK

SEQ ID NO: 46914 - protein, 9 aa, Artificial Sequence
  Description of Artificial Sequence: Synthetic peptide
VRIYDRCEM

SEQ ID NO: 46915 - protein, 9 aa, Artificial Sequence
  Description of Artificial Sequence: Synthetic peptide
LRCDPWLPQ

SEQ ID NO: 46916 - protein, 9 aa, Artificial Sequence
  Description of Artificial Sequence: Synthetic peptide
LEWSEKINP

SEQ ID NO: 46917 - protein, 9 aa, Artificial Sequence
  Description of Artificial Sequence: Synthetic peptide
VTPEETVVI

SEQ ID NO: 46918 - protein, 9 aa, Artificial Sequence
  Description of Artificial Sequence: Synthetic peptide
PDPPKQYED

SEQ ID NO: 46919 - protein, 9 aa, Artificial Sequence
  Description of Artificial Sequence: Synthetic peptide
HPGHDRPDF

SEQ ID NO: 46920 - protein, 9 aa, Artificial Sequence
  Description of Artificial Sequence: Synthetic peptide
EHGHDDQHR

SEQ ID NO: 46921 - protein, 9 aa, Artificial Sequence
  Description of Artificial Sequence: Synthetic peptide
DVENQDWAM

SEQ ID NO: 46922 - protein, 9 aa, Artificial Sequence
  Description of Artificial Sequence: Synthetic peptide
PHSEKYAKH

SEQ ID NO: 46923 - protein, 9 aa, Artificial Sequence
  Description of Artificial Sequence: Synthetic peptide
PDCLDEGAA

SEQ ID NO: 46924 - protein, 9 aa, Artificial Sequence
  Description of Artificial Sequence: Synthetic peptide
QDCSDWTKF

SEQ ID NO: 46925 - protein, 9 aa, Artificial Sequence
  Description of Artificial Sequence: Synthetic peptide
QDHENNLKT

SEQ ID NO: 46926 - protein, 9 aa, Artificial Sequence
  Description of Artificial Sequence: Synthetic peptide
ADSQDPLQQ

SEQ ID NO: 46927 - protein, 9 aa, Artificial Sequence
  Description of Artificial Sequence: Synthetic peptide
PLESHESEF

SEQ ID NO: 46928 - protein, 9 aa, Artificial Sequence
  Description of Artificial Sequence: Synthetic peptide
HDDTHRIVN

SEQ ID NO: 46929 - protein, 9 aa, Artificial Sequence
  Description of Artificial Sequence: Synthetic peptide
CNEFKHERR

SEQ ID NO: 46930 - protein, 9 aa, Artificial Sequence
  Description of Artificial Sequence: Synthetic peptide
NEARDGEPF

SEQ ID NO: 46931 - protein, 9 aa, Artificial Sequence
  Description of Artificial Sequence: Synthetic peptide
PQNPSEWPP

SEQ ID NO: 46932 - protein, 9 aa, Artificial Sequence
  Description of Artificial Sequence: Synthetic peptide
CRCDTKIRE

SEQ ID NO: 46933 - protein, 9 aa, Artificial Sequence
  Description of Artificial Sequence: Synthetic peptide
QEPLSKHGV

SEQ ID NO: 46934 - protein, 9 aa, Artificial Sequence
  Description of Artificial Sequence: Synthetic peptide
INPEIRQIE

SEQ ID NO: 46935 - protein, 9 aa, Artificial Sequence
  Description of Artificial Sequence: Synthetic peptide
YDLSPKMYY

SEQ ID NO: 46936 - protein, 9 aa, Artificial Sequence
  Description of Artificial Sequence: Synthetic peptide
EVSDYQQWV

SEQ ID NO: 46937 - protein, 9 aa, Artificial Sequence
  Description of Artificial Sequence: Synthetic peptide
RPPHKMSKE

SEQ ID NO: 46938 - protein, 9 aa, Artificial Sequence
  Description of Artificial Sequence: Synthetic peptide
EDRCPGNPG

SEQ ID NO: 46939 - protein, 9 aa, Artificial Sequence
  Description of Artificial Sequence: Synthetic peptide
LMPDPVQGI

SEQ ID NO: 46940 - protein, 9 aa, Artificial Sequence
  Description of Artificial Sequence: Synthetic peptide
SIDRDHPKE

SEQ ID NO: 46941 - protein, 9 aa, Artificial Sequence
  Description of Artificial Sequence: Synthetic peptide
ADPQVEWAM

SEQ ID NO: 46942 - protein, 9 aa, Artificial Sequence
  Description of Artificial Sequence: Synthetic peptide
CQRQEPDRE

SEQ ID NO: 46943 - protein, 9 aa, Artificial Sequence
  Description of Artificial Sequence: Synthetic peptide
DAMEDSKTC

SEQ ID NO: 46944 - protein, 9 aa, Artificial Sequence
  Description of Artificial Sequence: Synthetic peptide
PDPKAWSNY

SEQ ID NO: 46945 - protein, 9 aa, Artificial Sequence
  Description of Artificial Sequence: Synthetic peptide
PQPKQCMCW

SEQ ID NO: 46946 - protein, 9 aa, Artificial Sequence
  Description of Artificial Sequence: Synthetic peptide
DMSDEGQKT

SEQ ID NO: 46947 - protein, 9 aa, Artificial Sequence
  Description of Artificial Sequence: Synthetic peptide
QEPFTESKS

SEQ ID NO: 46948 - protein, 9 aa, Artificial Sequence
  Description of Artificial Sequence: Synthetic peptide
YECDSEHEV

SEQ ID NO: 46949 - protein, 9 aa, Artificial Sequence
  Description of Artificial Sequence: Synthetic peptide
PHGTEDWDY

SEQ ID NO: 46950 - protein, 9 aa, Artificial Sequence
  Description of Artificial Sequence: Synthetic peptide
VRPHDVFYM

SEQ ID NO: 46951 - protein, 9 aa, Artificial Sequence
  Description of Artificial Sequence: Synthetic peptide
FHPDKLMPM

SEQ ID NO: 46952 - protein, 9 aa, Artificial Sequence
  Description of Artificial Sequence: Synthetic peptide
QDRRDDHGG

SEQ ID NO: 46953 - protein, 9 aa, Artificial Sequence
  Description of Artificial Sequence: Synthetic peptide
LKLRDEFNE

SEQ ID NO: 46954 - protein, 9 aa, Artificial Sequence
  Description of Artificial Sequence: Synthetic peptide
CEVQDEWTG

SEQ ID NO: 46955 - protein, 9 aa, Artificial Sequence
  Description of Artificial Sequence: Synthetic peptide
EVPNNHHYT

SEQ ID NO: 46956 - protein, 9 aa, Artificial Sequence
  Description of Artificial Sequence: Synthetic peptide
PEPSWKYRP

SEQ ID NO: 46957 - protein, 9 aa, Artificial Sequence
  Description of Artificial Sequence: Synthetic peptide
CPWCDTQTY

SEQ ID NO: 46958 - protein, 9 aa, Artificial Sequence
  Description of Artificial Sequence: Synthetic peptide
KDKCDYMTV

SEQ ID NO: 46959 - protein, 9 aa, Artificial Sequence
  Description of Artificial Sequence: Synthetic peptide
CATDPIHRV

SEQ ID NO: 46960 - protein, 9 aa, Artificial Sequence
  Description of Artificial Sequence: Synthetic peptide
CESFPGPVM

SEQ ID NO: 46961 - protein, 9 aa, Artificial Sequence
  Description of Artificial Sequence: Synthetic peptide
PHVCGEGKI

SEQ ID NO: 46962 - protein, 9 aa, Artificial Sequence
  Description of Artificial Sequence: Synthetic peptide
LREEELMTR

SEQ ID NO: 46963 - protein, 9 aa, Artificial Sequence
  Description of Artificial Sequence: Synthetic peptide
WNPANMFNI

SEQ ID NO: 46964 - protein, 9 aa, Artificial Sequence
  Description of Artificial Sequence: Synthetic peptide
CDPCMECGS

SEQ ID NO: 46965 - protein, 9 aa, Artificial Sequence
  Description of Artificial Sequence: Synthetic peptide
LHPPPHQCP

SEQ ID NO: 46966 - protein, 9 aa, Artificial Sequence
  Description of Artificial Sequence: Synthetic peptide
NDFSDEPCM

SEQ ID NO: 46967 - protein, 9 aa, Artificial Sequence
  Description of Artificial Sequence: Synthetic peptide
IDPPGTESM

SEQ ID NO: 46968 - protein, 9 aa, Artificial Sequence
  Description of Artificial Sequence: Synthetic peptide
PYPQQSHLE

SEQ ID NO: 46969 - protein, 9 aa, Artificial Sequence
  Description of Artificial Sequence: Synthetic peptide
VRPFDDGPM

SEQ ID NO: 46970 - protein, 9 aa, Artificial Sequence
  Description of Artificial Sequence: Synthetic peptide
TEPSKMPIW

SEQ ID NO: 46971 - protein, 9 aa, Artificial Sequence
  Description of Artificial Sequence: Synthetic peptide
PTMKFKDRD

SEQ ID NO: 46972 - protein, 9 aa, Artificial Sequence
  Description of Artificial Sequence: Synthetic peptide
CHSGDILDT

SEQ ID NO: 46973 - protein, 9 aa, Artificial Sequence
  Description of Artificial Sequence: Synthetic peptide
PPKMMDNEF

SEQ ID NO: 46974 - protein, 9 aa, Artificial Sequence
  Description of Artificial Sequence: Synthetic peptide
PSWGGREEE

SEQ ID NO: 46975 - protein, 9 aa, Artificial Sequence
  Description of Artificial Sequence: Synthetic peptide
LDQNNGPET

SEQ ID NO: 46976 - protein, 9 aa, Artificial Sequence
  Description of Artificial Sequence: Synthetic peptide
NETPDAWNV

SEQ ID NO: 46977 - protein, 9 aa, Artificial Sequence
  Description of Artificial Sequence: Synthetic peptide
WEVPRWPPI

SEQ ID NO: 46978 - protein, 9 aa, Artificial Sequence
  Description of Artificial Sequence: Synthetic peptide
FDTDQRQSE

SEQ ID NO: 46979 - protein, 9 aa, Artificial Sequence
  Description of Artificial Sequence: Synthetic peptide
WIPCQFSKI

SEQ ID NO: 46980 - protein, 9 aa, Artificial Sequence
  Description of Artificial Sequence: Synthetic peptide
PLDHRPHTF

SEQ ID NO: 46981 - protein, 9 aa, Artificial Sequence
  Description of Artificial Sequence: Synthetic peptide
IWEDMKGKF

SEQ ID NO: 46982 - protein, 9 aa, Artificial Sequence
  Description of Artificial Sequence: Synthetic peptide
WRIRPQQEI

SEQ ID NO: 46983 - protein, 9 aa, Artificial Sequence
  Description of Artificial Sequence: Synthetic peptide
PGHFEPTNY

SEQ ID NO: 46984 - protein, 9 aa, Artificial Sequence
  Description of Artificial Sequence: Synthetic peptide
MEPPDMQCP

SEQ ID NO: 46985 - protein, 9 aa, Artificial Sequence
  Description of Artificial Sequence: Synthetic peptide
DVPFVNASD

SEQ ID NO: 46986 - protein, 9 aa, Artificial Sequence
  Description of Artificial Sequence: Synthetic peptide
LRTCPVWRQ

SEQ ID NO: 46987 - protein, 9 aa, Artificial Sequence
  Description of Artificial Sequence: Synthetic peptide
PIECMGQHW

SEQ ID NO: 46988 - protein, 9 aa, Artificial Sequence
  Description of Artificial Sequence: Synthetic peptide
VDPSNAAFK

SEQ ID NO: 46989 - protein, 9 aa, Artificial Sequence
  Description of Artificial Sequence: Synthetic peptide
DPPIDMSKD

SEQ ID NO: 46990 - protein, 9 aa, Artificial Sequence
  Description of Artificial Sequence: Synthetic peptide
WKPGYGAKP

SEQ ID NO: 46991 - protein, 9 aa, Artificial Sequence
  Description of Artificial Sequence: Synthetic peptide
CPPSETRVP

SEQ ID NO: 46992 - protein, 9 aa, Artificial Sequence
  Description of Artificial Sequence: Synthetic peptide
MQDRDTPTI

SEQ ID NO: 46993 - protein, 9 aa, Artificial Sequence
  Description of Artificial Sequence: Synthetic peptide
RHPEGRRVD

SEQ ID NO: 46994 - protein, 9 aa, Artificial Sequence
  Description of Artificial Sequence: Synthetic peptide
PFKQGRENP

SEQ ID NO: 46995 - protein, 9 aa, Artificial Sequence
  Description of Artificial Sequence: Synthetic peptide
LDVTPQPEG

SEQ ID NO: 46996 - protein, 9 aa, Artificial Sequence
  Description of Artificial Sequence: Synthetic peptide
EVGDMAHQS

SEQ ID NO: 46997 - protein, 9 aa, Artificial Sequence
  Description of Artificial Sequence: Synthetic peptide
PGHHPLEDH

SEQ ID NO: 46998 - protein, 9 aa, Artificial Sequence
  Description of Artificial Sequence: Synthetic peptide
HLPVYAPKD

SEQ ID NO: 46999 - protein, 9 aa, Artificial Sequence
  Description of Artificial Sequence: Synthetic peptide
DVEAMDFGT

SEQ ID NO: 47000 - protein, 9 aa, Artificial Sequence
  Description of Artificial Sequence: Synthetic peptide
CTPGFWSER

SEQ ID NO: 47001 - protein, 9 aa, Artificial Sequence
  Description of Artificial Sequence: Synthetic peptide
IDHIGDDRF

SEQ ID NO: 47002 - protein, 9 aa, Artificial Sequence
  Description of Artificial Sequence: Synthetic peptide
PQSHKLIES

SEQ ID NO: 47003 - protein, 9 aa, Artificial Sequence
  Description of Artificial Sequence: Synthetic peptide
CNPPCTPFN

SEQ ID NO: 47004 - protein, 9 aa, Artificial Sequence
  Description of Artificial Sequence: Synthetic peptide
DVCDDHKPT

SEQ ID NO: 47005 - protein, 9 aa, Artificial Sequence
  Description of Artificial Sequence: Synthetic peptide
PPPLAGWMW

SEQ ID NO: 47006 - protein, 9 aa, Artificial Sequence
  Description of Artificial Sequence: Synthetic peptide
YDPNMFPYT

SEQ ID NO: 47007 - protein, 9 aa, Artificial Sequence
  Description of Artificial Sequence: Synthetic peptide
IKPKDQAPL

SEQ ID NO: 47008 - protein, 9 aa, Artificial Sequence
  Description of Artificial Sequence: Synthetic peptide
ERCHDTEKY

SEQ ID NO: 47009 - protein, 9 aa, Artificial Sequence
  Description of Artificial Sequence: Synthetic peptide
CKKESTCAL

SEQ ID NO: 47010 - protein, 9 aa, Artificial Sequence
  Description of Artificial Sequence: Synthetic peptide
PKPVQPHND

SEQ ID NO: 47011 - protein, 9 aa, Artificial Sequence
  Description of Artificial Sequence: Synthetic peptide
DPELDIPEE

SEQ ID NO: 47012 - protein, 9 aa, Artificial Sequence
  Description of Artificial Sequence: Synthetic peptide
HEDTHVLRQ

SEQ ID NO: 47013 - protein, 9 aa, Artificial Sequence
  Description of Artificial Sequence: Synthetic peptide
ESEEHRVMS

SEQ ID NO: 47014 - protein, 9 aa, Artificial Sequence
  Description of Artificial Sequence: Synthetic peptide
PMEEMHSHE

SEQ ID NO: 47015 - protein, 9 aa, Artificial Sequence
  Description of Artificial Sequence: Synthetic peptide
DEEVEGMSV

SEQ ID NO: 47016 - protein, 9 aa, Artificial Sequence
  Description of Artificial Sequence: Synthetic peptide
DEPFFAIRP

SEQ ID NO: 47017 - protein, 9 aa, Artificial Sequence
  Description of Artificial Sequence: Synthetic peptide
YEMMPNIKY

SEQ ID NO: 47018 - protein, 9 aa, Artificial Sequence
  Description of Artificial Sequence: Synthetic peptide
EYPENSSHF

SEQ ID NO: 47019 - protein, 9 aa, Artificial Sequence
  Description of Artificial Sequence: Synthetic peptide
WNPGPVLTH

SEQ ID NO: 47020 - protein, 9 aa, Artificial Sequence
  Description of Artificial Sequence: Synthetic peptide
GERNGGWRL

SEQ ID NO: 47021 - protein, 9 aa, Artificial Sequence
  Description of Artificial Sequence: Synthetic peptide
PADIDDDGN

SEQ ID NO: 47022 - protein, 9 aa, Artificial Sequence
  Description of Artificial Sequence: Synthetic peptide
QRWSDGDKC

SEQ ID NO: 47023 - protein, 9 aa, Artificial Sequence
  Description of Artificial Sequence: Synthetic peptide
AKICDADQL

SEQ ID NO: 47024 - protein, 9 aa, Artificial Sequence
  Description of Artificial Sequence: Synthetic peptide
VEPRYDDPC

SEQ ID NO: 47025 - protein, 9 aa, Artificial Sequence
  Description of Artificial Sequence: Synthetic peptide
PSEHWGCDG

SEQ ID NO: 47026 - protein, 9 aa, Artificial Sequence
  Description of Artificial Sequence: Synthetic peptide
RNCCGPNPY

SEQ ID NO: 47027 - protein, 9 aa, Artificial Sequence
  Description of Artificial Sequence: Synthetic peptide
PEQMDRAHG

SEQ ID NO: 47028 - protein, 9 aa, Artificial Sequence
  Description of Artificial Sequence: Synthetic peptide
MVPDQYQMS

SEQ ID NO: 47029 - protein, 9 aa, Artificial Sequence
  Description of Artificial Sequence: Synthetic peptide
WVPDLEDVQ

SEQ ID NO: 47030 - protein, 9 aa, Artificial Sequence
  Description of Artificial Sequence: Synthetic peptide
IDKITWQKH

SEQ ID NO: 47031 - protein, 9 aa, Artificial Sequence
  Description of Artificial Sequence: Synthetic peptide
DDWTPYLNE

SEQ ID NO: 47032 - protein, 9 aa, Artificial Sequence
  Description of Artificial Sequence: Synthetic peptide
PDQSEMTKA

SEQ ID NO: 47033 - protein, 9 aa, Artificial Sequence
  Description of Artificial Sequence: Synthetic peptide
FHPDRRNPT

SEQ ID NO: 47034 - protein, 9 aa, Artificial Sequence
  Description of Artificial Sequence: Synthetic peptide
QDTNETNDV

SEQ ID NO: 47035 - protein, 9 aa, Artificial Sequence
  Description of Artificial Sequence: Synthetic peptide
WNEIDEGRW

SEQ ID NO: 47036 - protein, 9 aa, Artificial Sequence
  Description of Artificial Sequence: Synthetic peptide
DDNQSRGCP

SEQ ID NO: 47037 - protein, 9 aa, Artificial Sequence
  Description of Artificial Sequence: Synthetic peptide
EIQQHDNVI

SEQ ID NO: 47038 - protein, 9 aa, Artificial Sequence
  Description of Artificial Sequence: Synthetic peptide
SPPDWWPFD

SEQ ID NO: 47039 - protein, 9 aa, Artificial Sequence
  Description of Artificial Sequence: Synthetic peptide
MEPDMRQYS

SEQ ID NO: 47040 - protein, 9 aa, Artificial Sequence
  Description of Artificial Sequence: Synthetic peptide
DIEFLDCET

SEQ ID NO: 47041 - protein, 9 aa, Artificial Sequence
  Description of Artificial Sequence: Synthetic peptide
LEMQQLTKV

SEQ ID NO: 47042 - protein, 9 aa, Artificial Sequence
  Description of Artificial Sequence: Synthetic peptide
IEELEEESH

SEQ ID NO: 47043 - protein, 9 aa, Artificial Sequence
  Description of Artificial Sequence: Synthetic peptide
EDWRKDNNF

SEQ ID NO: 47044 - protein, 9 aa, Artificial Sequence
  Description of Artificial Sequence: Synthetic peptide
PDMKDFKQE

SEQ ID NO: 47045 - protein, 9 aa, Artificial Sequence
  Description of Artificial Sequence: Synthetic peptide
WPWKPPYSD

SEQ ID NO: 47046 - protein, 9 aa, Artificial Sequence
  Description of Artificial Sequence: Synthetic peptide
LQPDRECIG

SEQ ID NO: 47047 - protein, 9 aa, Artificial Sequence
  Description of Artificial Sequence: Synthetic peptide
WDMMFPCKW

SEQ ID NO: 47048 - protein, 9 aa, Artificial Sequence
  Description of Artificial Sequence: Synthetic peptide
PHDPGECYP

SEQ ID NO: 47049 - protein, 9 aa, Artificial Sequence
  Description of Artificial Sequence: Synthetic peptide
PQDHMVNMQ

SEQ ID NO: 47050 - protein, 9 aa, Artificial Sequence
  Description of Artificial Sequence: Synthetic peptide
DNDEQLGGC

SEQ ID NO: 47051 - protein, 9 aa, Artificial Sequence
  Description of Artificial Sequence: Synthetic peptide
CKPHQQRIH

SEQ ID NO: 47052 - protein, 9 aa, Artificial Sequence
  Description of Artificial Sequence: Synthetic peptide
GDMNVWVRY

SEQ ID NO: 47053 - protein, 9 aa, Artificial Sequence
  Description of Artificial Sequence: Synthetic peptide
CEGAAWPQI

SEQ ID NO: 47054 - protein, 9 aa, Artificial Sequence
  Description of Artificial Sequence: Synthetic peptide
SVDDFSSHV

SEQ ID NO: 47055 - protein, 9 aa, Artificial Sequence
  Description of Artificial Sequence: Synthetic peptide
VIPESMNHA

SEQ ID NO: 47056 - protein, 9 aa, Artificial Sequence
  Description of Artificial Sequence: Synthetic peptide
DDPCMRCNV

SEQ ID NO: 47057 - protein, 9 aa, Artificial Sequence
  Description of Artificial Sequence: Synthetic peptide
KKPWDDHTR

SEQ ID NO: 47058 - protein, 9 aa, Artificial Sequence
  Description of Artificial Sequence: Synthetic peptide
SWPQGDYRF

SEQ ID NO: 47059 - protein, 9 aa, Artificial Sequence
  Description of Artificial Sequence: Synthetic peptide
PVCPMKQRS

SEQ ID NO: 47060 - protein, 9 aa, Artificial Sequence
  Description of Artificial Sequence: Synthetic peptide
DGEEDWMDP

SEQ ID NO: 47061 - protein, 9 aa, Artificial Sequence
  Description of Artificial Sequence: Synthetic peptide
MESEESVKP

SEQ ID NO: 47062 - protein, 9 aa, Artificial Sequence
  Description of Artificial Sequence: Synthetic peptide
QDTESKFRD

SEQ ID NO: 47063 - protein, 9 aa, Artificial Sequence
  Description of Artificial Sequence: Synthetic peptide
DDMDLIIKH

SEQ ID NO: 47064 - protein, 9 aa, Artificial Sequence
  Description of Artificial Sequence: Synthetic peptide
ENPSNWHDW

SEQ ID NO: 47065 - protein, 9 aa, Artificial Sequence
  Description of Artificial Sequence: Synthetic peptide
HHVSMDNKH

SEQ ID NO: 47066 - protein, 9 aa, Artificial Sequence
  Description of Artificial Sequence: Synthetic peptide
NRDWFEWKM

SEQ ID NO: 47067 - protein, 9 aa, Artificial Sequence
  Description of Artificial Sequence: Synthetic peptide
CQPESVWHP

SEQ ID NO: 47068 - protein, 9 aa, Artificial Sequence
  Description of Artificial Sequence: Synthetic peptide
PPCGKGTLC

SEQ ID NO: 47069 - protein, 9 aa, Artificial Sequence
  Description of Artificial Sequence: Synthetic peptide
PYMLCNSRS

SEQ ID NO: 47070 - protein, 9 aa, Artificial Sequence
  Description of Artificial Sequence: Synthetic peptide
GEPEAKGNG

SEQ ID NO: 47071 - protein, 9 aa, Artificial Sequence
  Description of Artificial Sequence: Synthetic peptide
VNLDEMPKA

SEQ ID NO: 47072 - protein, 9 aa, Artificial Sequence
  Description of Artificial Sequence: Synthetic peptide
ADRCEQIVL

SEQ ID NO: 47073 - protein, 9 aa, Artificial Sequence
  Description of Artificial Sequence: Synthetic peptide
VNPGQESGE

SEQ ID NO: 47074 - protein, 9 aa, Artificial Sequence
  Description of Artificial Sequence: Synthetic peptide
CMPDIMTWS

SEQ ID NO: 47075 - protein, 9 aa, Artificial Sequence
  Description of Artificial Sequence: Synthetic peptide
ENHENCDQD

SEQ ID NO: 47076 - protein, 9 aa, Artificial Sequence
  Description of Artificial Sequence: Synthetic peptide
MDDMDRRNS

SEQ ID NO: 47077 - protein, 9 aa, Artificial Sequence
  Description of Artificial Sequence: Synthetic peptide
MDWCEYHRS

SEQ ID NO: 47078 - protein, 9 aa, Artificial Sequence
  Description of Artificial Sequence: Synthetic peptide
PDHERVEYC

SEQ ID NO: 47079 - protein, 9 aa, Artificial Sequence
  Description of Artificial Sequence: Synthetic peptide
IRPIICRKG

SEQ ID NO: 47080 - protein, 9 aa, Artificial Sequence
  Description of Artificial Sequence: Synthetic peptide
PPEHCEHTQ

SEQ ID NO: 47081 - protein, 9 aa, Artificial Sequence
  Description of Artificial Sequence: Synthetic peptide
LEPPGLDSM

SEQ ID NO: 47082 - protein, 9 aa, Artificial Sequence
  Description of Artificial Sequence: Synthetic peptide
LKTCPEGNT

SEQ ID NO: 47083 - protein, 9 aa, Artificial Sequence
  Description of Artificial Sequence: Synthetic peptide
WDKCAWAWD

SEQ ID NO: 47084 - protein, 9 aa, Artificial Sequence
  Description of Artificial Sequence: Synthetic peptide
MRVCDELEP

SEQ ID NO: 47085 - protein, 9 aa, Artificial Sequence
  Description of Artificial Sequence: Synthetic peptide
MRHDPFHRR

SEQ ID NO: 47086 - protein, 9 aa, Artificial Sequence
  Description of Artificial Sequence: Synthetic peptide
LVPDDRLWD

SEQ ID NO: 47087 - protein, 9 aa, Artificial Sequence
  Description of Artificial Sequence: Synthetic peptide
VWDDKSEAE

SEQ ID NO: 47088 - protein, 9 aa, Artificial Sequence
  Description of Artificial Sequence: Synthetic peptide
VNPCSIMKA

SEQ ID NO: 47089 - protein, 9 aa, Artificial Sequence
  Description of Artificial Sequence: Synthetic peptide
GPDEEWNIQ

SEQ ID NO: 47090 - protein, 9 aa, Artificial Sequence
  Description of Artificial Sequence: Synthetic peptide
PMDEFGHYV

SEQ ID NO: 47091 - protein, 9 aa, Artificial Sequence
  Description of Artificial Sequence: Synthetic peptide
PGEENEPPA

SEQ ID NO: 47092 - protein, 9 aa, Artificial Sequence
  Description of Artificial Sequence: Synthetic peptide
ENDEASICM

SEQ ID NO: 47093 - protein, 9 aa, Artificial Sequence
  Description of Artificial Sequence: Synthetic peptide
PSRTEGDKM

SEQ ID NO: 47094 - protein, 9 aa, Artificial Sequence
  Description of Artificial Sequence: Synthetic peptide
PDRQQPMQH

SEQ ID NO: 47095 - protein, 9 aa, Artificial Sequence
  Description of Artificial Sequence: Synthetic peptide
PNQLDKPAM

SEQ ID NO: 47096 - protein, 9 aa, Artificial Sequence
  Description of Artificial Sequence: Synthetic peptide
EHPNDKIAI

SEQ ID NO: 47097 - protein, 9 aa, Artificial Sequence
  Description of Artificial Sequence: Synthetic peptide
CNMATSNRS

SEQ ID NO: 47098 - protein, 9 aa, Artificial Sequence
  Description of Artificial Sequence: Synthetic peptide
PWPDHQRAC

SEQ ID NO: 47099 - protein, 9 aa, Artificial Sequence
  Description of Artificial Sequence: Synthetic peptide
WPDSRNSPN

SEQ ID NO: 47100 - protein, 9 aa, Artificial Sequence
  Description of Artificial Sequence: Synthetic peptide
FDDRKRDAR

SEQ ID NO: 47101 - protein, 9 aa, Artificial Sequence
  Description of Artificial Sequence: Synthetic peptide
LYCEADRKI

SEQ ID NO: 47102 - protein, 9 aa, Artificial Sequence
  Description of Artificial Sequence: Synthetic peptide
PNENKGQGF

SEQ ID NO: 47103 - protein, 9 aa, Artificial Sequence
  Description of Artificial Sequence: Synthetic peptide
TYPDVCIGW

SEQ ID NO: 47104 - protein, 9 aa, Artificial Sequence
  Description of Artificial Sequence: Synthetic peptide
PQQQEGGTE

SEQ ID NO: 47105 - protein, 9 aa, Artificial Sequence
  Description of Artificial Sequence: Synthetic peptide
PPNFKIYKE

SEQ ID NO: 47106 - protein, 9 aa, Artificial Sequence
  Description of Artificial Sequence: Synthetic peptide
LPAGDEKGE

SEQ ID NO: 47107 - protein, 9 aa, Artificial Sequence
  Description of Artificial Sequence: Synthetic peptide
REPLVTEGG

SEQ ID NO: 47108 - protein, 9 aa, Artificial Sequence
  Description of Artificial Sequence: Synthetic peptide
LCDEGDMPS

SEQ ID NO: 47109 - protein, 9 aa, Artificial Sequence
  Description of Artificial Sequence: Synthetic peptide
TEDFENHDG

SEQ ID NO: 47110 - protein, 9 aa, Artificial Sequence
  Description of Artificial Sequence: Synthetic peptide
NEPQSPVGY

SEQ ID NO: 47111 - protein, 9 aa, Artificial Sequence
  Description of Artificial Sequence: Synthetic peptide
WDGIDRQNT

SEQ ID NO: 47112 - protein, 9 aa, Artificial Sequence
  Description of Artificial Sequence: Synthetic peptide
MKVTDKLDD

SEQ ID NO: 47113 - protein, 9 aa, Artificial Sequence
  Description of Artificial Sequence: Synthetic peptide
QDETDEWQR

SEQ ID NO: 47114 - protein, 9 aa, Artificial Sequence
  Description of Artificial Sequence: Synthetic peptide
QEFIGEERT

SEQ ID NO: 47115 - protein, 9 aa, Artificial Sequence
  Description of Artificial Sequence: Synthetic peptide
QDDIDLASW

SEQ ID NO: 47116 - protein, 9 aa, Artificial Sequence
  Description of Artificial Sequence: Synthetic peptide
PTDAALHGN

SEQ ID NO: 47117 - protein, 9 aa, Artificial Sequence
  Description of Artificial Sequence: Synthetic peptide
PTINDWKTK

SEQ ID NO: 47118 - protein, 9 aa, Artificial Sequence
  Description of Artificial Sequence: Synthetic peptide
PMDHEKRYH

SEQ ID NO: 47119 - protein, 9 aa, Artificial Sequence
  Description of Artificial Sequence: Synthetic peptide
YKCDDNFIP

SEQ ID NO: 47120 - protein, 9 aa, Artificial Sequence
  Description of Artificial Sequence: Synthetic peptide
RDSNCHFDK

SEQ ID NO: 47121 - protein, 9 aa, Artificial Sequence
  Description of Artificial Sequence: Synthetic peptide
YNDFNRGEW

SEQ ID NO: 47122 - protein, 9 aa, Artificial Sequence
  Description of Artificial Sequence: Synthetic peptide
PCDQTLIWQ

SEQ ID NO: 47123 - protein, 9 aa, Artificial Sequence
  Description of Artificial Sequence: Synthetic peptide
DFGCKDEST

SEQ ID NO: 47124 - protein, 9 aa, Artificial Sequence
  Description of Artificial Sequence: Synthetic peptide
CNLCTHAKC

SEQ ID NO: 47125 - protein, 9 aa, Artificial Sequence
  Description of Artificial Sequence: Synthetic peptide
ANPDSSVMH

SEQ ID NO: 47126 - protein, 9 aa, Artificial Sequence
  Description of Artificial Sequence: Synthetic peptide
FRDGDAAEE

SEQ ID NO: 47127 - protein, 9 aa, Artificial Sequence
  Description of Artificial Sequence: Synthetic peptide
PFPCQQDIF

SEQ ID NO: 47128 - protein, 9 aa, Artificial Sequence
  Description of Artificial Sequence: Synthetic peptide
VKNAERPRE

SEQ ID NO: 47129 - protein, 9 aa, Artificial Sequence
  Description of Artificial Sequence: Synthetic peptide
CDFCRQFIK

SEQ ID NO: 47130 - protein, 9 aa, Artificial Sequence
  Description of Artificial Sequence: Synthetic peptide
PDTSNKTFH

SEQ ID NO: 47131 - protein, 9 aa, Artificial Sequence
  Description of Artificial Sequence: Synthetic peptide
HERCSELEY

SEQ ID NO: 47132 - protein, 9 aa, Artificial Sequence
  Description of Artificial Sequence: Synthetic peptide
TDANRLCRK

SEQ ID NO: 47133 - protein, 9 aa, Artificial Sequence
  Description of Artificial Sequence: Synthetic peptide
PNGCDRSGG

SEQ ID NO: 47134 - protein, 9 aa, Artificial Sequence
  Description of Artificial Sequence: Synthetic peptide
LESDSFDRD

SEQ ID NO: 47135 - protein, 9 aa, Artificial Sequence
  Description of Artificial Sequence: Synthetic peptide
PDLQKRQGA

SEQ ID NO: 47136 - protein, 9 aa, Artificial Sequence
  Description of Artificial Sequence: Synthetic peptide
YEYWPDVSW

SEQ ID NO: 47137 - protein, 9 aa, Artificial Sequence
  Description of Artificial Sequence: Synthetic peptide
CPWWDFAEC

SEQ ID NO: 47138 - protein, 9 aa, Artificial Sequence
  Description of Artificial Sequence: Synthetic peptide
DQKDVKGKM

SEQ ID NO: 47139 - protein, 9 aa, Artificial Sequence
  Description of Artificial Sequence: Synthetic peptide
YELCPLPQH

SEQ ID NO: 47140 - protein, 9 aa, Artificial Sequence
  Description of Artificial Sequence: Synthetic peptide
DVEDCLICC

SEQ ID NO: 47141 - protein, 9 aa, Artificial Sequence
  Description of Artificial Sequence: Synthetic peptide
IMPEKMHTD

SEQ ID NO: 47142 - protein, 9 aa, Artificial Sequence
  Description of Artificial Sequence: Synthetic peptide
PHAEDRDNN

SEQ ID NO: 47143 - protein, 9 aa, Artificial Sequence
  Description of Artificial Sequence: Synthetic peptide
TVPDVRDCQ

SEQ ID NO: 47144 - protein, 9 aa, Artificial Sequence
  Description of Artificial Sequence: Synthetic peptide
EQHRDTMRP

SEQ ID NO: 47145 - protein, 9 aa, Artificial Sequence
  Description of Artificial Sequence: Synthetic peptide
CVMPHNHRL

SEQ ID NO: 47146 - protein, 9 aa, Artificial Sequence
  Description of Artificial Sequence: Synthetic peptide
PQEDEGVRQ

SEQ ID NO: 47147 - protein, 9 aa, Artificial Sequence
  Description of Artificial Sequence: Synthetic peptide
SQPNPEINW

SEQ ID NO: 47148 - protein, 9 aa, Artificial Sequence
  Description of Artificial Sequence: Synthetic peptide
PIDGNSHKD

SEQ ID NO: 47149 - protein, 9 aa, Artificial Sequence
  Description of Artificial Sequence: Synthetic peptide
PGEPADIKT

SEQ ID NO: 47150 - protein, 9 aa, Artificial Sequence
  Description of Artificial Sequence: Synthetic peptide
PDHWECIHD

SEQ ID NO: 47151 - protein, 9 aa, Artificial Sequence
  Description of Artificial Sequence: Synthetic peptide
QQPPLAPDV

SEQ ID NO: 47152 - protein, 9 aa, Artificial Sequence
  Description of Artificial Sequence: Synthetic peptide
YNPQNHVEG

SEQ ID NO: 47153 - protein, 9 aa, Artificial Sequence
  Description of Artificial Sequence: Synthetic peptide
GDNAKDFRG

SEQ ID NO: 47154 - protein, 9 aa, Artificial Sequence
  Description of Artificial Sequence: Synthetic peptide
FNVSWENKP

SEQ ID NO: 47155 - protein, 9 aa, Artificial Sequence
  Description of Artificial Sequence: Synthetic peptide
PERLNGPTP

SEQ ID NO: 47156 - protein, 9 aa, Artificial Sequence
  Description of Artificial Sequence: Synthetic peptide
FDPHRCSCH

SEQ ID NO: 47157 - protein, 9 aa, Artificial Sequence
  Description of Artificial Sequence: Synthetic peptide
DRLRDDYPC

SEQ ID NO: 47158 - protein, 9 aa, Artificial Sequence
  Description of Artificial Sequence: Synthetic peptide
VSEDDESHQ

SEQ ID NO: 47159 - protein, 9 aa, Artificial Sequence
  Description of Artificial Sequence: Synthetic peptide
FESTQEPIA

SEQ ID NO: 47160 - protein, 9 aa, Artificial Sequence
  Description of Artificial Sequence: Synthetic peptide
CKNFPMKNN

SEQ ID NO: 47161 - protein, 9 aa, Artificial Sequence
  Description of Artificial Sequence: Synthetic peptide
PVPMSHIMQ

SEQ ID NO: 47162 - protein, 9 aa, Artificial Sequence
  Description of Artificial Sequence: Synthetic peptide
HNGIEKTRE

SEQ ID NO: 47163 - protein, 9 aa, Artificial Sequence
  Description of Artificial Sequence: Synthetic peptide
KDPCADRWA

SEQ ID NO: 47164 - protein, 9 aa, Artificial Sequence
  Description of Artificial Sequence: Synthetic peptide
EVVDNMRSQ

SEQ ID NO: 47165 - protein, 9 aa, Artificial Sequence
  Description of Artificial Sequence: Synthetic peptide
ADYKDWAEH

SEQ ID NO: 47166 - protein, 9 aa, Artificial Sequence
  Description of Artificial Sequence: Synthetic peptide
PRNLPAYHS

SEQ ID NO: 47167 - protein, 9 aa, Artificial Sequence
  Description of Artificial Sequence: Synthetic peptide
PMSQICCDM

SEQ ID NO: 47168 - protein, 9 aa, Artificial Sequence
  Description of Artificial Sequence: Synthetic peptide
YDCWAKEAT

SEQ ID NO: 47169 - protein, 9 aa, Artificial Sequence
  Description of Artificial Sequence: Synthetic peptide
ENPEVWIEQ

SEQ ID NO: 47170 - protein, 9 aa, Artificial Sequence
  Description of Artificial Sequence: Synthetic peptide
IERWGVIDV

SEQ ID NO: 47171 - protein, 9 aa, Artificial Sequence
  Description of Artificial Sequence: Synthetic peptide
DADDRVEAT

SEQ ID NO: 47172 - protein, 9 aa, Artificial Sequence
  Description of Artificial Sequence: Synthetic peptide
CKDRPIIDC

SEQ ID NO: 47173 - protein, 9 aa, Artificial Sequence
  Description of Artificial Sequence: Synthetic peptide
NGDDHVFRE

SEQ ID NO: 47174 - protein, 9 aa, Artificial Sequence
  Description of Artificial Sequence: Synthetic peptide
DYIRIFDRH

SEQ ID NO: 47175 - protein, 9 aa, Artificial Sequence
  Description of Artificial Sequence: Synthetic peptide
QDHEREEYK

SEQ ID NO: 47176 - protein, 9 aa, Artificial Sequence
  Description of Artificial Sequence: Synthetic peptide
AEAKERFEM

SEQ ID NO: 47177 - protein, 9 aa, Artificial Sequence
  Description of Artificial Sequence: Synthetic peptide
PDDEKIEHP

SEQ ID NO: 47178 - protein, 9 aa, Artificial Sequence
  Description of Artificial Sequence: Synthetic peptide
MNPAVEKGM

SEQ ID NO: 47179 - protein, 9 aa, Artificial Sequence
  Description of Artificial Sequence: Synthetic peptide
CDPQYDQED

SEQ ID NO: 47180 - protein, 9 aa, Artificial Sequence
  Description of Artificial Sequence: Synthetic peptide
YEAHSDDRK

SEQ ID NO: 47181 - protein, 9 aa, Artificial Sequence
  Description of Artificial Sequence: Synthetic peptide
MDPCIEPGR

SEQ ID NO: 47182 - protein, 9 aa, Artificial Sequence
  Description of Artificial Sequence: Synthetic peptide
CQDEDEAMQ

SEQ ID NO: 47183 - protein, 9 aa, Artificial Sequence
  Description of Artificial Sequence: Synthetic peptide
PIAQDKVWS

SEQ ID NO: 47184 - protein, 9 aa, Artificial Sequence
  Description of Artificial Sequence: Synthetic peptide
PRLTDIREV

SEQ ID NO: 47185 - protein, 9 aa, Artificial Sequence
  Description of Artificial Sequence: Synthetic peptide
VPPFLDIRD

SEQ ID NO: 47186 - protein, 9 aa, Artificial Sequence
  Description of Artificial Sequence: Synthetic peptide
PEHPDPFSQ

SEQ ID NO: 47187 - protein, 9 aa, Artificial Sequence
  Description of Artificial Sequence: Synthetic peptide
YWCLDDPRD

SEQ ID NO: 47188 - protein, 9 aa, Artificial Sequence
  Description of Artificial Sequence: Synthetic peptide
ERVEDGMDH

SEQ ID NO: 47189 - protein, 9 aa, Artificial Sequence
  Description of Artificial Sequence: Synthetic peptide
RDYAPLLID

SEQ ID NO: 47190 - protein, 9 aa, Artificial Sequence
  Description of Artificial Sequence: Synthetic peptide
QVPEIQSMP

SEQ ID NO: 47191 - protein, 9 aa, Artificial Sequence
  Description of Artificial Sequence: Synthetic peptide
PRNGPYCDI

SEQ ID NO: 47192 - protein, 9 aa, Artificial Sequence
  Description of Artificial Sequence: Synthetic peptide
CDNGEDDHH

SEQ ID NO: 47193 - protein, 9 aa, Artificial Sequence
  Description of Artificial Sequence: Synthetic peptide
PFDTMDYRS

SEQ ID NO: 47194 - protein, 9 aa, Artificial Sequence
  Description of Artificial Sequence: Synthetic peptide
PNTHPEYSK

SEQ ID NO: 47195 - protein, 9 aa, Artificial Sequence
  Description of Artificial Sequence: Synthetic peptide
WNREDKRAQ

SEQ ID NO: 47196 - protein, 9 aa, Artificial Sequence
  Description of Artificial Sequence: Synthetic peptide
PDWCQDPGM

SEQ ID NO: 47197 - protein, 9 aa, Artificial Sequence
  Description of Artificial Sequence: Synthetic peptide
PQQPHWCDG

SEQ ID NO: 47198 - protein, 9 aa, Artificial Sequence
  Description of Artificial Sequence: Synthetic peptide
PPDPPGDNV

SEQ ID NO: 47199 - protein, 9 aa, Artificial Sequence
  Description of Artificial Sequence: Synthetic peptide
SPPNLRAFP

SEQ ID NO: 47200 - protein, 9 aa, Artificial Sequence
  Description of Artificial Sequence: Synthetic peptide
GEEDEQSNH

SEQ ID NO: 47201 - protein, 9 aa, Artificial Sequence
  Description of Artificial Sequence: Synthetic peptide
CHPTHQIRC

SEQ ID NO: 47202 - protein, 9 aa, Artificial Sequence
  Description of Artificial Sequence: Synthetic peptide
PFPYHLIVC

SEQ ID NO: 47203 - protein, 9 aa, Artificial Sequence
  Description of Artificial Sequence: Synthetic peptide
PNNQARGQC

SEQ ID NO: 47204 - protein, 9 aa, Artificial Sequence
  Description of Artificial Sequence: Synthetic peptide
KNPTWVMSD

SEQ ID NO: 47205 - protein, 9 aa, Artificial Sequence
  Description of Artificial Sequence: Synthetic peptide
YRHEEYWHN

SEQ ID NO: 47206 - protein, 9 aa, Artificial Sequence
  Description of Artificial Sequence: Synthetic peptide
LEHENGTPQ

SEQ ID NO: 47207 - protein, 9 aa, Artificial Sequence
  Description of Artificial Sequence: Synthetic peptide
QDPHAHRDD

SEQ ID NO: 47208 - protein, 9 aa, Artificial Sequence
  Description of Artificial Sequence: Synthetic peptide
VDLCRKQVK

SEQ ID NO: 47209 - protein, 9 aa, Artificial Sequence
  Description of Artificial Sequence: Synthetic peptide
PYWCDWPNG

SEQ ID NO: 47210 - protein, 9 aa, Artificial Sequence
  Description of Artificial Sequence: Synthetic peptide
YPCQNHWRT

SEQ ID NO: 47211 - protein, 9 aa, Artificial Sequence
  Description of Artificial Sequence: Synthetic peptide
MIPCHDRTY

SEQ ID NO: 47212 - protein, 9 aa, Artificial Sequence
  Description of Artificial Sequence: Synthetic peptide
QPADPPNDS

SEQ ID NO: 47213 - protein, 9 aa, Artificial Sequence
  Description of Artificial Sequence: Synthetic peptide
PKHADALRM

SEQ ID NO: 47214 - protein, 9 aa, Artificial Sequence
  Description of Artificial Sequence: Synthetic peptide
LEPCTDEFG

SEQ ID NO: 47215 - protein, 9 aa, Artificial Sequence
  Description of Artificial Sequence: Synthetic peptide
PDCDPAHHD

SEQ ID NO: 47216 - protein, 9 aa, Artificial Sequence
  Description of Artificial Sequence: Synthetic peptide
CRPQAIWLH

SEQ ID NO: 47217 - protein, 9 aa, Artificial Sequence
  Description of Artificial Sequence: Synthetic peptide
HEEIPQQPK

SEQ ID NO: 47218 - protein, 9 aa, Artificial Sequence
  Description of Artificial Sequence: Synthetic peptide
CEDLNKPMM

SEQ ID NO: 47219 - protein, 9 aa, Artificial Sequence
  Description of Artificial Sequence: Synthetic peptide
HNPSGPEFS

SEQ ID NO: 47220 - protein, 9 aa, Artificial Sequence
  Description of Artificial Sequence: Synthetic peptide
GDFIPKQEV

SEQ ID NO: 47221 - protein, 9 aa, Artificial Sequence
  Description of Artificial Sequence: Synthetic peptide
CKTQERANS

SEQ ID NO: 47222 - protein, 9 aa, Artificial Sequence
  Description of Artificial Sequence: Synthetic peptide
SDDDREREA

SEQ ID NO: 47223 - protein, 9 aa, Artificial Sequence
  Description of Artificial Sequence: Synthetic peptide
FEPVSGETP

SEQ ID NO: 47224 - protein, 9 aa, Artificial Sequence
  Description of Artificial Sequence: Synthetic peptide
PHSDSWCDR

SEQ ID NO: 47225 - protein, 9 aa, Artificial Sequence
  Description of Artificial Sequence: Synthetic peptide
WHKRDDKTQ

SEQ ID NO: 47226 - protein, 9 aa, Artificial Sequence
  Description of Artificial Sequence: Synthetic peptide
PYPPMWRGM

SEQ ID NO: 47227 - protein, 9 aa, Artificial Sequence
  Description of Artificial Sequence: Synthetic peptide
IEDVWECPY

SEQ ID NO: 47228 - protein, 9 aa, Artificial Sequence
  Description of Artificial Sequence: Synthetic peptide
DYDWSDMKC

SEQ ID NO: 47229 - protein, 9 aa, Artificial Sequence
  Description of Artificial Sequence: Synthetic peptide
IEMHEKKEE

SEQ ID NO: 47230 - protein, 9 aa, Artificial Sequence
  Description of Artificial Sequence: Synthetic peptide
CEPRDCNFY

SEQ ID NO: 47231 - protein, 9 aa, Artificial Sequence
  Description of Artificial Sequence: Synthetic peptide
PTMRESMES

SEQ ID NO: 47232 - protein, 9 aa, Artificial Sequence
  Description of Artificial Sequence: Synthetic peptide
EVPFKTSTT

SEQ ID NO: 47233 - protein, 9 aa, Artificial Sequence
  Description of Artificial Sequence: Synthetic peptide
VSPHKTSRN

SEQ ID NO: 47234 - protein, 9 aa, Artificial Sequence
  Description of Artificial Sequence: Synthetic peptide
ADHCNWSRT

SEQ ID NO: 47235 - protein, 9 aa, Artificial Sequence
  Description of Artificial Sequence: Synthetic peptide
SDHDNVFED

SEQ ID NO: 47236 - protein, 9 aa, Artificial Sequence
  Description of Artificial Sequence: Synthetic peptide
SRPGDRGVQ

SEQ ID NO: 47237 - protein, 9 aa, Artificial Sequence
  Description of Artificial Sequence: Synthetic peptide
QEPDSYACM

SEQ ID NO: 47238 - protein, 9 aa, Artificial Sequence
  Description of Artificial Sequence: Synthetic peptide
DEECQRVPM

SEQ ID NO: 47239 - protein, 9 aa, Artificial Sequence
  Description of Artificial Sequence: Synthetic peptide
VDNMSEGRQ

SEQ ID NO: 47240 - protein, 9 aa, Artificial Sequence
  Description of Artificial Sequence: Synthetic peptide
EQEHDEEKP

SEQ ID NO: 47241 - protein, 9 aa, Artificial Sequence
  Description of Artificial Sequence: Synthetic peptide
PEFGWWIAM

SEQ ID NO: 47242 - protein, 9 aa, Artificial Sequence
  Description of Artificial Sequence: Synthetic peptide
PDELMGWQQ

SEQ ID NO: 47243 - protein, 9 aa, Artificial Sequence
  Description of Artificial Sequence: Synthetic peptide
CECAGWSYE

SEQ ID NO: 47244 - protein, 9 aa, Artificial Sequence
  Description of Artificial Sequence: Synthetic peptide
MEPFHVNKV

SEQ ID NO: 47245 - protein, 9 aa, Artificial Sequence
  Description of Artificial Sequence: Synthetic peptide
HKDWHDADL

SEQ ID NO: 47246 - protein, 9 aa, Artificial Sequence
  Description of Artificial Sequence: Synthetic peptide
PCNCDSWQN

SEQ ID NO: 47247 - protein, 9 aa, Artificial Sequence
  Description of Artificial Sequence: Synthetic peptide
NEDWEAPEG

SEQ ID NO: 47248 - protein, 9 aa, Artificial Sequence
  Description of Artificial Sequence: Synthetic peptide
PIEAMHDGW

SEQ ID NO: 47249 - protein, 9 aa, Artificial Sequence
  Description of Artificial Sequence: Synthetic peptide
MIPQSEERW

SEQ ID NO: 47250 - protein, 9 aa, Artificial Sequence
  Description of Artificial Sequence: Synthetic peptide
YKTGDEYGL

SEQ ID NO: 47251 - protein, 9 aa, Artificial Sequence
  Description of Artificial Sequence: Synthetic peptide
PLDKEPMER

SEQ ID NO: 47252 - protein, 9 aa, Artificial Sequence
  Description of Artificial Sequence: Synthetic peptide
HEDHDPAQE

SEQ ID NO: 47253 - protein, 9 aa, Artificial Sequence
  Description of Artificial Sequence: Synthetic peptide
GNQDRTNRK

SEQ ID NO: 47254 - protein, 9 aa, Artificial Sequence
  Description of Artificial Sequence: Synthetic peptide
CQTRDTLEL

SEQ ID NO: 47255 - protein, 9 aa, Artificial Sequence
  Description of Artificial Sequence: Synthetic peptide
EADEQKTRW

SEQ ID NO: 47256 - protein, 9 aa, Artificial Sequence
  Description of Artificial Sequence: Synthetic peptide
TEADEEWDT

SEQ ID NO: 47257 - protein, 9 aa, Artificial Sequence
  Description of Artificial Sequence: Synthetic peptide
GDKWIGCEL

SEQ ID NO: 47258 - protein, 9 aa, Artificial Sequence
  Description of Artificial Sequence: Synthetic peptide
ECDCRDTPC

SEQ ID NO: 47259 - protein, 9 aa, Artificial Sequence
  Description of Artificial Sequence: Synthetic peptide
VQPQQMHKT

SEQ ID NO: 47260 - protein, 9 aa, Artificial Sequence
  Description of Artificial Sequence: Synthetic peptide
PKCCSGMTT

SEQ ID NO: 47261 - protein, 9 aa, Artificial Sequence
  Description of Artificial Sequence: Synthetic peptide
YNPFYGADM

SEQ ID NO: 47262 - protein, 9 aa, Artificial Sequence
  Description of Artificial Sequence: Synthetic peptide
CPWCDMKPW

SEQ ID NO: 47263 - protein, 9 aa, Artificial Sequence
  Description of Artificial Sequence: Synthetic peptide
KDRDTCRAD

SEQ ID NO: 47264 - protein, 9 aa, Artificial Sequence
  Description of Artificial Sequence: Synthetic peptide
SELTNWVRW

SEQ ID NO: 47265 - protein, 9 aa, Artificial Sequence
  Description of Artificial Sequence: Synthetic peptide
YNPAACVEL

SEQ ID NO: 47266 - protein, 9 aa, Artificial Sequence
  Description of Artificial Sequence: Synthetic peptide
CVMPTIYRG

SEQ ID NO: 47267 - protein, 9 aa, Artificial Sequence
  Description of Artificial Sequence: Synthetic peptide
EIKPYDARN

SEQ ID NO: 47268 - protein, 9 aa, Artificial Sequence
  Description of Artificial Sequence: Synthetic peptide
EFSGHDEPD

SEQ ID NO: 47269 - protein, 9 aa, Artificial Sequence
  Description of Artificial Sequence: Synthetic peptide
VDIKPKGAI

SEQ ID NO: 47270 - protein, 9 aa, Artificial Sequence
  Description of Artificial Sequence: Synthetic peptide
MEQWDPDEW

SEQ ID NO: 47271 - protein, 9 aa, Artificial Sequence
  Description of Artificial Sequence: Synthetic peptide
VEVTPGFKF

SEQ ID NO: 47272 - protein, 9 aa, Artificial Sequence
  Description of Artificial Sequence: Synthetic peptide
PPNLCWNQH

SEQ ID NO: 47273 - protein, 9 aa, Artificial Sequence
  Description of Artificial Sequence: Synthetic peptide
SRVKDCHKA

SEQ ID NO: 47274 - protein, 9 aa, Artificial Sequence
  Description of Artificial Sequence: Synthetic peptide
ENEKPRTRC

SEQ ID NO: 47275 - protein, 9 aa, Artificial Sequence
  Description of Artificial Sequence: Synthetic peptide
PHDWSPEFA

SEQ ID NO: 47276 - protein, 9 aa, Artificial Sequence
  Description of Artificial Sequence: Synthetic peptide
PHQGDREGF

SEQ ID NO: 47277 - protein, 9 aa, Artificial Sequence
  Description of Artificial Sequence: Synthetic peptide
IESDDIRTQ

SEQ ID NO: 47278 - protein, 9 aa, Artificial Sequence
  Description of Artificial Sequence: Synthetic peptide
HDDPPGGGF

SEQ ID NO: 47279 - protein, 9 aa, Artificial Sequence
  Description of Artificial Sequence: Synthetic peptide
EIQDLLCKA

SEQ ID NO: 47280 - protein, 9 aa, Artificial Sequence
  Description of Artificial Sequence: Synthetic peptide
CVEDHWLHI

SEQ ID NO: 47281 - protein, 9 aa, Artificial Sequence
  Description of Artificial Sequence: Synthetic peptide
HIAEPKNKP

SEQ ID NO: 47282 - protein, 9 aa, Artificial Sequence
  Description of Artificial Sequence: Synthetic peptide
HEWKCEKRV

SEQ ID NO: 47283 - protein, 9 aa, Artificial Sequence
  Description of Artificial Sequence: Synthetic peptide
YEATPHGRQ

SEQ ID NO: 47284 - protein, 9 aa, Artificial Sequence
  Description of Artificial Sequence: Synthetic peptide
YPPNEHWQC

SEQ ID NO: 47285 - protein, 9 aa, Artificial Sequence
  Description of Artificial Sequence: Synthetic peptide
LNPAGKIWD

SEQ ID NO: 47286 - protein, 9 aa, Artificial Sequence
  Description of Artificial Sequence: Synthetic peptide
PEVGSPYPS

SEQ ID NO: 47287 - protein, 9 aa, Artificial Sequence
  Description of Artificial Sequence: Synthetic peptide
IERHEHNPY

SEQ ID NO: 47288 - protein, 9 aa, Artificial Sequence
  Description of Artificial Sequence: Synthetic peptide
HDPPKLGCM

SEQ ID NO: 47289 - protein, 9 aa, Artificial Sequence
  Description of Artificial Sequence: Synthetic peptide
NDDCEESQK

SEQ ID NO: 47290 - protein, 9 aa, Artificial Sequence
  Description of Artificial Sequence: Synthetic peptide
PVVERFNDP

SEQ ID NO: 47291 - protein, 9 aa, Artificial Sequence
  Description of Artificial Sequence: Synthetic peptide
PFEEYEQTD

SEQ ID NO: 47292 - protein, 9 aa, Artificial Sequence
  Description of Artificial Sequence: Synthetic peptide
VRPEKQRVG

SEQ ID NO: 47293 - protein, 9 aa, Artificial Sequence
  Description of Artificial Sequence: Synthetic peptide
YSDEQGICQ

SEQ ID NO: 47294 - protein, 9 aa, Artificial Sequence
  Description of Artificial Sequence: Synthetic peptide
HNVPDVRRN

SEQ ID NO: 47295 - protein, 9 aa, Artificial Sequence
  Description of Artificial Sequence: Synthetic peptide
EADERSKEQ

SEQ ID NO: 47296 - protein, 9 aa, Artificial Sequence
  Description of Artificial Sequence: Synthetic peptide
PYIWQAMHR

SEQ ID NO: 47297 - protein, 9 aa, Artificial Sequence
  Description of Artificial Sequence: Synthetic peptide
KDHIAEHRL

SEQ ID NO: 47298 - protein, 9 aa, Artificial Sequence
  Description of Artificial Sequence: Synthetic peptide
AKPKCPPEG

SEQ ID NO: 47299 - protein, 9 aa, Artificial Sequence
  Description of Artificial Sequence: Synthetic peptide
DDDIGADSV

SEQ ID NO: 47300 - protein, 9 aa, Artificial Sequence
  Description of Artificial Sequence: Synthetic peptide
DDPFENIGV

SEQ ID NO: 47301 - protein, 9 aa, Artificial Sequence
  Description of Artificial Sequence: Synthetic peptide
WDGRTNDKA

SEQ ID NO: 47302 - protein, 9 aa, Artificial Sequence
  Description of Artificial Sequence: Synthetic peptide
EGDDCMWCR

SEQ ID NO: 47303 - protein, 9 aa, Artificial Sequence
  Description of Artificial Sequence: Synthetic peptide
VNRRRRDEM

SEQ ID NO: 47304 - protein, 9 aa, Artificial Sequence
  Description of Artificial Sequence: Synthetic peptide
TEVDDKICY

SEQ ID NO: 47305 - protein, 9 aa, Artificial Sequence
  Description of Artificial Sequence: Synthetic peptide
EHGDEMHPP

SEQ ID NO: 47306 - protein, 9 aa, Artificial Sequence
  Description of Artificial Sequence: Synthetic peptide
LEKFPYQPL

SEQ ID NO: 47307 - protein, 9 aa, Artificial Sequence
  Description of Artificial Sequence: Synthetic peptide
FDEMHTCYD

SEQ ID NO: 47308 - protein, 9 aa, Artificial Sequence
  Description of Artificial Sequence: Synthetic peptide
KCPDEMNNI

SEQ ID NO: 47309 - protein, 9 aa, Artificial Sequence
  Description of Artificial Sequence: Synthetic peptide
IDTGDWLVG

SEQ ID NO: 47310 - protein, 9 aa, Artificial Sequence
  Description of Artificial Sequence: Synthetic peptide
PVPCCHYDP

SEQ ID NO: 47311 - protein, 9 aa, Artificial Sequence
  Description of Artificial Sequence: Synthetic peptide
PGTEDYSRW

SEQ ID NO: 47312 - protein, 9 aa, Artificial Sequence
  Description of Artificial Sequence: Synthetic peptide
LNYQPCCRI

SEQ ID NO: 47313 - protein, 9 aa, Artificial Sequence
  Description of Artificial Sequence: Synthetic peptide
PAEEYHSRE

SEQ ID NO: 47314 - protein, 9 aa, Artificial Sequence
  Description of Artificial Sequence: Synthetic peptide
PEELYLYRK

SEQ ID NO: 47315 - protein, 9 aa, Artificial Sequence
  Description of Artificial Sequence: Synthetic peptide
MDVSDQWPE

SEQ ID NO: 47316 - protein, 9 aa, Artificial Sequence
  Description of Artificial Sequence: Synthetic peptide
WFPDHMSGI

SEQ ID NO: 47317 - protein, 9 aa, Artificial Sequence
  Description of Artificial Sequence: Synthetic peptide
CPPPSHHID

SEQ ID NO: 47318 - protein, 9 aa, Artificial Sequence
  Description of Artificial Sequence: Synthetic peptide
LPPMKQDEE

SEQ ID NO: 47319 - protein, 9 aa, Artificial Sequence
  Description of Artificial Sequence: Synthetic peptide
WRPCAYCQT

SEQ ID NO: 47320 - protein, 9 aa, Artificial Sequence
  Description of Artificial Sequence: Synthetic peptide
CDDNGCTRD

SEQ ID NO: 47321 - protein, 9 aa, Artificial Sequence
  Description of Artificial Sequence: Synthetic peptide
RYPEPDAQV

SEQ ID NO: 47322 - protein, 9 aa, Artificial Sequence
  Description of Artificial Sequence: Synthetic peptide
QVPIMDDFF

SEQ ID NO: 47323 - protein, 9 aa, Artificial Sequence
  Description of Artificial Sequence: Synthetic peptide
PKLPEYTDS

SEQ ID NO: 47324 - protein, 9 aa, Artificial Sequence
  Description of Artificial Sequence: Synthetic peptide
MNSEPVTET

SEQ ID NO: 47325 - protein, 9 aa, Artificial Sequence
  Description of Artificial Sequence: Synthetic peptide
HVPENFVQC

SEQ ID NO: 47326 - protein, 9 aa, Artificial Sequence
  Description of Artificial Sequence: Synthetic peptide
PDRCHSGDW

SEQ ID NO: 47327 - protein, 9 aa, Artificial Sequence
  Description of Artificial Sequence: Synthetic peptide
YPPPPNQHH

SEQ ID NO: 47328 - protein, 9 aa, Artificial Sequence
  Description of Artificial Sequence: Synthetic peptide
IFPYTDKFI

SEQ ID NO: 47329 - protein, 9 aa, Artificial Sequence
  Description of Artificial Sequence: Synthetic peptide
PGDCYWLER

SEQ ID NO: 47330 - protein, 9 aa, Artificial Sequence
  Description of Artificial Sequence: Synthetic peptide
HEHRPYFRV

SEQ ID NO: 47331 - protein, 9 aa, Artificial Sequence
  Description of Artificial Sequence: Synthetic peptide
DLFNHDSPH

SEQ ID NO: 47332 - protein, 9 aa, Artificial Sequence
  Description of Artificial Sequence: Synthetic peptide
YDDNNWGSA

SEQ ID NO: 47333 - protein, 9 aa, Artificial Sequence
  Description of Artificial Sequence: Synthetic peptide
HDSGPTFDM

SEQ ID NO: 47334 - protein, 9 aa, Artificial Sequence
  Description of Artificial Sequence: Synthetic peptide
EIDLEDAQK

SEQ ID NO: 47335 - protein, 9 aa, Artificial Sequence
  Description of Artificial Sequence: Synthetic peptide
PQEDKQCKP

SEQ ID NO: 47336 - protein, 9 aa, Artificial Sequence
  Description of Artificial Sequence: Synthetic peptide
DVVHLDWKE

SEQ ID NO: 47337 - protein, 9 aa, Artificial Sequence
  Description of Artificial Sequence: Synthetic peptide
IVPCLWPIP

SEQ ID NO: 47338 - protein, 9 aa, Artificial Sequence
  Description of Artificial Sequence: Synthetic peptide
WEPVNAAMA

SEQ ID NO: 47339 - protein, 9 aa, Artificial Sequence
  Description of Artificial Sequence: Synthetic peptide
QEPLRCIPG

SEQ ID NO: 47340 - protein, 9 aa, Artificial Sequence
  Description of Artificial Sequence: Synthetic peptide
GNCEPSEPE

SEQ ID NO: 47341 - protein, 9 aa, Artificial Sequence
  Description of Artificial Sequence: Synthetic peptide
DNVNNKQKG

SEQ ID NO: 47342 - protein, 9 aa, Artificial Sequence
  Description of Artificial Sequence: Synthetic peptide
PDWFKADDT

SEQ ID NO: 47343 - protein, 9 aa, Artificial Sequence
  Description of Artificial Sequence: Synthetic peptide
KHPAELDAA

SEQ ID NO: 47344 - protein, 9 aa, Artificial Sequence
  Description of Artificial Sequence: Synthetic peptide
PTGHQRGTF

SEQ ID NO: 47345 - protein, 9 aa, Artificial Sequence
  Description of Artificial Sequence: Synthetic peptide
WENEEDKVT

SEQ ID NO: 47346 - protein, 9 aa, Artificial Sequence
  Description of Artificial Sequence: Synthetic peptide
QNWYDKLPT

SEQ ID NO: 47347 - protein, 9 aa, Artificial Sequence
  Description of Artificial Sequence: Synthetic peptide
SDARECDIM

SEQ ID NO: 47348 - protein, 9 aa, Artificial Sequence
  Description of Artificial Sequence: Synthetic peptide
QDSQDQQQW

SEQ ID NO: 47349 - protein, 9 aa, Artificial Sequence
  Description of Artificial Sequence: Synthetic peptide
DNCDAGKWD

SEQ ID NO: 47350 - protein, 9 aa, Artificial Sequence
  Description of Artificial Sequence: Synthetic peptide
VKDLADPPG

SEQ ID NO: 47351 - protein, 9 aa, Artificial Sequence
  Description of Artificial Sequence: Synthetic peptide
PSAPNMWKQ

SEQ ID NO: 47352 - protein, 9 aa, Artificial Sequence
  Description of Artificial Sequence: Synthetic peptide
ENEETWIFY

SEQ ID NO: 47353 - protein, 9 aa, Artificial Sequence
  Description of Artificial Sequence: Synthetic peptide
WDNMDQTQG

SEQ ID NO: 47354 - protein, 9 aa, Artificial Sequence
  Description of Artificial Sequence: Synthetic peptide
EYPCSKMRY

SEQ ID NO: 47355 - protein, 9 aa, Artificial Sequence
  Description of Artificial Sequence: Synthetic peptide
QCDNESDSM

SEQ ID NO: 47356 - protein, 9 aa, Artificial Sequence
  Description of Artificial Sequence: Synthetic peptide
SDPDIACVH

SEQ ID NO: 47357 - protein, 9 aa, Artificial Sequence
  Description of Artificial Sequence: Synthetic peptide
HDDQMHCSS

SEQ ID NO: 47358 - protein, 9 aa, Artificial Sequence
  Description of Artificial Sequence: Synthetic peptide
CEEETIEQS

SEQ ID NO: 47359 - protein, 9 aa, Artificial Sequence
  Description of Artificial Sequence: Synthetic peptide
HRAQDPQQF

SEQ ID NO: 47360 - protein, 9 aa, Artificial Sequence
  Description of Artificial Sequence: Synthetic peptide
HRTDEPTQN

SEQ ID NO: 47361 - protein, 9 aa, Artificial Sequence
  Description of Artificial Sequence: Synthetic peptide
DVGTGDDRQ

SEQ ID NO: 47362 - protein, 9 aa, Artificial Sequence
  Description of Artificial Sequence: Synthetic peptide
VDACSHNRS

SEQ ID NO: 47363 - protein, 9 aa, Artificial Sequence
  Description of Artificial Sequence: Synthetic peptide
FDHQNWFEQ

SEQ ID NO: 47364 - protein, 9 aa, Artificial Sequence
  Description of Artificial Sequence: Synthetic peptide
VNCPDQHDV

SEQ ID NO: 47365 - protein, 9 aa, Artificial Sequence
  Description of Artificial Sequence: Synthetic peptide
CDMAHMLPV

SEQ ID NO: 47366 - protein, 9 aa, Artificial Sequence
  Description of Artificial Sequence: Synthetic peptide
KDDCSMMPQ

SEQ ID NO: 47367 - protein, 9 aa, Artificial Sequence
  Description of Artificial Sequence: Synthetic peptide
YENKTDMKF

SEQ ID NO: 47368 - protein, 9 aa, Artificial Sequence
  Description of Artificial Sequence: Synthetic peptide
EYPDNQWSQ

SEQ ID NO: 47369 - protein, 9 aa, Artificial Sequence
  Description of Artificial Sequence: Synthetic peptide
CDWPIENRA

SEQ ID NO: 47370 - protein, 9 aa, Artificial Sequence
  Description of Artificial Sequence: Synthetic peptide
VDHVKRCPV

SEQ ID NO: 47371 - protein, 9 aa, Artificial Sequence
  Description of Artificial Sequence: Synthetic peptide
WRTSDKYER

SEQ ID NO: 47372 - protein, 9 aa, Artificial Sequence
  Description of Artificial Sequence: Synthetic peptide
PKIQRVTET

SEQ ID NO: 47373 - protein, 9 aa, Artificial Sequence
  Description of Artificial Sequence: Synthetic peptide
LDDWMMPVS

SEQ ID NO: 47374 - protein, 9 aa, Artificial Sequence
  Description of Artificial Sequence: Synthetic peptide
HYPRNLVEE

SEQ ID NO: 47375 - protein, 9 aa, Artificial Sequence
  Description of Artificial Sequence: Synthetic peptide
NEFQEDKSV

SEQ ID NO: 47376 - protein, 9 aa, Artificial Sequence
  Description of Artificial Sequence: Synthetic peptide
DRGQDNHRI

SEQ ID NO: 47377 - protein, 9 aa, Artificial Sequence
  Description of Artificial Sequence: Synthetic peptide
PFNDGGIIE

SEQ ID NO: 47378 - protein, 9 aa, Artificial Sequence
  Description of Artificial Sequence: Synthetic peptide
CYPCLQDKG

SEQ ID NO: 47379 - protein, 9 aa, Artificial Sequence
  Description of Artificial Sequence: Synthetic peptide
CTPNHCGGK

SEQ ID NO: 47380 - protein, 9 aa, Artificial Sequence
  Description of Artificial Sequence: Synthetic peptide
SDTEKMHQQ

SEQ ID NO: 47381 - protein, 9 aa, Artificial Sequence
  Description of Artificial Sequence: Synthetic peptide
GPCCPKYNC

SEQ ID NO: 47382 - protein, 9 aa, Artificial Sequence
  Description of Artificial Sequence: Synthetic peptide
TLPADKPKG

SEQ ID NO: 47383 - protein, 9 aa, Artificial Sequence
  Description of Artificial Sequence: Synthetic peptide
FTEEDEIRE

SEQ ID NO: 47384 - protein, 9 aa, Artificial Sequence
  Description of Artificial Sequence: Synthetic peptide
PDFQKVVSH

SEQ ID NO: 47385 - protein, 9 aa, Artificial Sequence
  Description of Artificial Sequence: Synthetic peptide
CNPDHMYCQ

SEQ ID NO: 47386 - protein, 9 aa, Artificial Sequence
  Description of Artificial Sequence: Synthetic peptide
HETCGENVC

SEQ ID NO: 47387 - protein, 9 aa, Artificial Sequence
  Description of Artificial Sequence: Synthetic peptide
WELAQKHKP

SEQ ID NO: 47388 - protein, 9 aa, Artificial Sequence
  Description of Artificial Sequence: Synthetic peptide
YYNEPKAKG

SEQ ID NO: 47389 - protein, 9 aa, Artificial Sequence
  Description of Artificial Sequence: Synthetic peptide
CKTDEFDNH

SEQ ID NO: 47390 - protein, 9 aa, Artificial Sequence
  Description of Artificial Sequence: Synthetic peptide
KRPEICEWG

SEQ ID NO: 47391 - protein, 9 aa, Artificial Sequence
  Description of Artificial Sequence: Synthetic peptide
LDPPNSHVN

SEQ ID NO: 47392 - protein, 9 aa, Artificial Sequence
  Description of Artificial Sequence: Synthetic peptide
PHDNHRHGL

SEQ ID NO: 47393 - protein, 9 aa, Artificial Sequence
  Description of Artificial Sequence: Synthetic peptide
PIVDWKRQD

SEQ ID NO: 47394 - protein, 9 aa, Artificial Sequence
  Description of Artificial Sequence: Synthetic peptide
YRDMPGQHN

SEQ ID NO: 47395 - protein, 9 aa, Artificial Sequence
  Description of Artificial Sequence: Synthetic peptide
YYPMADPSC

SEQ ID NO: 47396 - protein, 9 aa, Artificial Sequence
  Description of Artificial Sequence: Synthetic peptide
PVNHKDQMT

SEQ ID NO: 47397 - protein, 9 aa, Artificial Sequence
  Description of Artificial Sequence: Synthetic peptide
EYEWVDEPQ

SEQ ID NO: 47398 - protein, 9 aa, Artificial Sequence
  Description of Artificial Sequence: Synthetic peptide
PYPGGAVRA

SEQ ID NO: 47399 - protein, 9 aa, Artificial Sequence
  Description of Artificial Sequence: Synthetic peptide
RKPWVASRV

SEQ ID NO: 47400 - protein, 9 aa, Artificial Sequence
  Description of Artificial Sequence: Synthetic peptide
NDPWTPISY

SEQ ID NO: 47401 - protein, 9 aa, Artificial Sequence
  Description of Artificial Sequence: Synthetic peptide
YRFGPFEQE

SEQ ID NO: 47402 - protein, 9 aa, Artificial Sequence
  Description of Artificial Sequence: Synthetic peptide
RRLPDFDDV

SEQ ID NO: 47403 - protein, 9 aa, Artificial Sequence
  Description of Artificial Sequence: Synthetic peptide
QPPESMVQL

SEQ ID NO: 47404 - protein, 9 aa, Artificial Sequence
  Description of Artificial Sequence: Synthetic peptide
DEWTNKRNS

SEQ ID NO: 47405 - protein, 9 aa, Artificial Sequence
  Description of Artificial Sequence: Synthetic peptide
CRFTDDSSV

SEQ ID NO: 47406 - protein, 9 aa, Artificial Sequence
  Description of Artificial Sequence: Synthetic peptide
PWNLPWRPG

SEQ ID NO: 47407 - protein, 9 aa, Artificial Sequence
  Description of Artificial Sequence: Synthetic peptide
YESNTKSDV

SEQ ID NO: 47408 - protein, 9 aa, Artificial Sequence
  Description of Artificial Sequence: Synthetic peptide
IEQEDQGYH

SEQ ID NO: 47409 - protein, 9 aa, Artificial Sequence
  Description of Artificial Sequence: Synthetic peptide
EVLDDMKWN

SEQ ID NO: 47410 - protein, 9 aa, Artificial Sequence
  Description of Artificial Sequence: Synthetic peptide
FNPMVYAHK

SEQ ID NO: 47411 - protein, 9 aa, Artificial Sequence
  Description of Artificial Sequence: Synthetic peptide
QVDEWGGHE

SEQ ID NO: 47412 - protein, 9 aa, Artificial Sequence
  Description of Artificial Sequence: Synthetic peptide
PMLQSRGWN

SEQ ID NO: 47413 - protein, 9 aa, Artificial Sequence
  Description of Artificial Sequence: Synthetic peptide
PYACHHPDF

SEQ ID NO: 47414 - protein, 9 aa, Artificial Sequence
  Description of Artificial Sequence: Synthetic peptide
PHTNRECDC

SEQ ID NO: 47415 - protein, 9 aa, Artificial Sequence
  Description of Artificial Sequence: Synthetic peptide
WYDDDLLAN

SEQ ID NO: 47416 - protein, 9 aa, Artificial Sequence
  Description of Artificial Sequence: Synthetic peptide
PPGCGWYDN

SEQ ID NO: 47417 - protein, 9 aa, Artificial Sequence
  Description of Artificial Sequence: Synthetic peptide
WQPTHPARF

SEQ ID NO: 47418 - protein, 9 aa, Artificial Sequence
  Description of Artificial Sequence: Synthetic peptide
EWDDPYGWE

SEQ ID NO: 47419 - protein, 9 aa, Artificial Sequence
  Description of Artificial Sequence: Synthetic peptide
DQPWFGWQT

SEQ ID NO: 47420 - protein, 9 aa, Artificial Sequence
  Description of Artificial Sequence: Synthetic peptide
KHPDQWTMT

SEQ ID NO: 47421 - protein, 9 aa, Artificial Sequence
  Description of Artificial Sequence: Synthetic peptide
YIDRDDSEI

SEQ ID NO: 47422 - protein, 9 aa, Artificial Sequence
  Description of Artificial Sequence: Synthetic peptide
VDYRTTVKS

SEQ ID NO: 47423 - protein, 9 aa, Artificial Sequence
  Description of Artificial Sequence: Synthetic peptide
CDDERMDQP

SEQ ID NO: 47424 - protein, 9 aa, Artificial Sequence
  Description of Artificial Sequence: Synthetic peptide
GVPIIEPRV

SEQ ID NO: 47425 - protein, 9 aa, Artificial Sequence
  Description of Artificial Sequence: Synthetic peptide
WPKGTKDEA

SEQ ID NO: 47426 - protein, 9 aa, Artificial Sequence
  Description of Artificial Sequence: Synthetic peptide
DRVHPDHLY

SEQ ID NO: 47427 - protein, 9 aa, Artificial Sequence
  Description of Artificial Sequence: Synthetic peptide
NEQHNRDQQ

SEQ ID NO: 47428 - protein, 9 aa, Artificial Sequence
  Description of Artificial Sequence: Synthetic peptide
QEPKETLMI

SEQ ID NO: 47429 - protein, 9 aa, Artificial Sequence
  Description of Artificial Sequence: Synthetic peptide
KRWMEVDTY

SEQ ID NO: 47430 - protein, 9 aa, Artificial Sequence
  Description of Artificial Sequence: Synthetic peptide
LNNKDPPPV

SEQ ID NO: 47431 - protein, 9 aa, Artificial Sequence
  Description of Artificial Sequence: Synthetic peptide
FPHPDSSKH

SEQ ID NO: 47432 - protein, 9 aa, Artificial Sequence
  Description of Artificial Sequence: Synthetic peptide
PDHSRLEYP

SEQ ID NO: 47433 - protein, 9 aa, Artificial Sequence
  Description of Artificial Sequence: Synthetic peptide
LEPIQLDMF

SEQ ID NO: 47434 - protein, 9 aa, Artificial Sequence
  Description of Artificial Sequence: Synthetic peptide
WPPCHITQL

SEQ ID NO: 47435 - protein, 9 aa, Artificial Sequence
  Description of Artificial Sequence: Synthetic peptide
CPLRDDDPA

SEQ ID NO: 47436 - protein, 9 aa, Artificial Sequence
  Description of Artificial Sequence: Synthetic peptide
EDENMKSTN

SEQ ID NO: 47437 - protein, 9 aa, Artificial Sequence
  Description of Artificial Sequence: Synthetic peptide
PTEPDEQYA

SEQ ID NO: 47438 - protein, 20 aa, Artificial Sequence
  Description of Artificial Sequence: Synthetic peptide
VAYNVGGQMATNNQSSTTAP

SEQ ID NO: 47439 - protein, 20 aa, Artificial Sequence
  Description of Artificial Sequence: Synthetic peptide
IVPGSVWMERDVYLQGPIWA
